United States Patent Application Publication US 2026/0295084 A1, published October 1, 2026 (application 19/168,014).

The application's sequence listing, which the Patent Office published only in electronic form, follows.

SEQUENCE LISTING (6419 sequences)

SEQ ID NO: 1 - protein, 743 aa, synthetic construct
MAADGYLPDWLEDNLSEGIREWWALKPGAPQPKANQQHQDNARGLVLPGYKYLGPGNGLDKGEPVNAADAAALEHDKAYDQQLKAGDNPYLKYNHADAEFQERLKEDTSFGGNLGRAVFQAKKRLLEPLGLVEEAAKTAPGKKRPVEQSPQEPDSSAGIGKSGAQPAKKRLNFGQTGDTESVPDPQPIGEPPAAPSGVGSLTMASGGGAPVADNNEGADGVGSSSGNWHCDSQWLGDRVITTSTRTWALPTYNNHLYKQISNSTSGGSSNDNAYFGYSTPWGYFDFNRFHCHFSPRDWQRLINNNWGFRPKRLNFKLFNIQVKEVTDNNGVKTIANNLTSTVQVFTDSDYQLPYVLGSAHEGCLPPFPADVFMIPQYGYLTLNDGSQAVGRSSFYCLEYFPSQMLRTGNNFQFSYEFENVPFHSSYAHSQSLDRLMNPLIDQYLYYLSKTINGSGQNQQTLKFSVAGPSNMAVQGRNYIPGPSYRQQRVSTTVTQNNNSEFAWPGASSWALNGRNSLMNPGPAMASHKEGEDRFFPLSGSLIFGKQGTGRDNVDADKVMITNEEEIKTTNPVATESYGQVATNHQSDGTLAVPFKAQAQTGWVQNQGILPGMVWQDRDVYLQGPIWAKIPHTDGNFHPSPLMGGFGMKHPPPQILIKNTPVPADPPTAFNKDKLNSFITQYSTGQVSVEIEWELQKENSKRWNPEIQYTSNYYKSNNVEFAVNTEGVYSEPRPIGTRYLTRNL

SEQ ID NO: 2 - protein, 6 aa, synthetic construct
HDSPHK

SEQ ID NO: 3 - DNA, 18 bp, synthetic construct
  source 1..18: mol_type = other DNA
cacgacagcccacacaaa

SEQ ID NO: 4 - protein, 742 aa, synthetic construct
MAADGYLPDWLEDNLSEGIREWWALKPGAPQPKANQQHQDNARGLVLPGYKYLGPGNGLDKGEPVNAADAAALEHDKAYDQQLKAGDNPYLKYNHADAEFQERLKEDTSFGGNLGRAVFQAKKRLLEPLGLVEEAAKTAPGKKRPVEQSPQEPDSSAGIGKSGAQPAKKRLNFGQTGDTESVPDPQPIGEPPAAPSGVGSLTMASGGGAPVADNNEGADGVGSSSGNWHCDSQWLGDRVITTSTRTWALPTYNNHLYKQISNSTSGGSSNDNAYFGYSTPWGYFDFNRFHCHFSPRDWQRLINNNWGFRPKRLNFKLFNIQVKEVTDNNGVKTIANNLTSTVQVFTDSDYQLPYVLGSAHEGCLPPFPADVFMIPQYGYLTLNDGSQAVGRSSFYCLEYFPSQMLRTGNNFQFSYEFENVPFHSSYAHSQSLDRLMNPLIDQYLYYLSKTENVSGSPHSKAQNQQTLKFSVAGPSNMAVQGRNYIPGPSYRQQRVSTTVTQNNNSEFAWPGASSWALNGRNSLMNPGPAMASHKEGEDRFFPLSGSLIFGKQGTGRDNVDADKVMITNEEEIKTTNPVATESYGQVATNHQSAQAQAQTGWVQNQGILPGMVWQDRDVYLQGPIWAKIPHTDGNFHPSPLMGGFGMKHPPPQILIKNTPVPADPPTAFNKDKLNSFITQYSTGQVSVEIEWELQKENSKRWNPEIQYTSNYYKSNNVEFAVNTEGVYSEPRPIGTRYLTRNL

SEQ ID NO: 5 - DNA, 2226 bp, synthetic construct
  source 1..2226: mol_type = other DNA
atggctgccgatggttatcttccagattggctcgaggacaaccttagtgaaggaattcgcgagtggtgggctttgaaacctggagcccctcaacccaaggcaaatcaacaacatcaagacaacgctcgaggtcttgtgcttccgggttacaaataccttggacccggcaacggactcgacaagggggagccggtcaacgcagcagacgcggcggccctcgagcacgacaaggcctacgaccagcagctcaaggccggagacaacccgtacctcaagtacaaccacgccgacgccgagttccaggagcggctcaaagaagatacgtcttttgggggcaacctcgggcgagcagtcttccaggccaaaaagaggcttcttgaacctcttggtctggttgaggaagcggctaagacggctcctggaaagaagaggcctgtagagcagtctcctcaggaaccggactcctccgcgggtattggcaaatcgggtgcacagcccgctaaaaagagactcaatttcggtcagactggcgacacagagtcagtcccagaccctcaaccaatcggagaacctcccgcagccccctcaggtgtgggatctcttacaatggcttcaggtggtggcgcaccagtggcagacaataacgaaggtgccgatggagtgggtagttcctcgggaaattggcattgcgattcccaatggctgggggacagagtcatcaccaccagcacccgaacctgggccctgcccacctacaacaatcacctctacaagcaaatctccaacagcacatctggaggatcttcaaatgacaacgcctacttcggctacagcaccccctgggggtattttgacttcaacagattccactgccacttctcaccacgtgactggcagcgactcatcaacaacaactggggattccggcctaagcgactcaacttcaagctcttcaacattcaggtcaaagaggttacggacaacaatggagtcaagaccatcgccaataaccttaccagcacggtccaggtcttcacggactcagactatcagctcccgtacgtgctcgggtcggctcacgagggctgcctcccgccgttcccagcggacgttttcatgattcctcagtacgggtatctgacgcttaatgatggaagccaggccgtgggtcgttcgtccttttactgcctggaatatttcccgtcgcaaatgctaagaacgggtaacaacttccagttcagctacgagtttgagaacgtacctttccatagcagctacgctcacagccaaagcctggaccgactaatgaatccactcatcgaccaatacttgtactatctctctaagactgagaatgtgagcgggagccctcatagcaaggctcagaatcagcagactctaaaattcagtgtggccggacccagcaacatggctgtccagggaagaaactacatacctggacccagctaccgacaacaacgtgtctcaaccactgtgactcaaaacaacaacagcgaatttgcttggcctggagcttcttcttgggctctcaatggacgtaatagcttgatgaatcctggacctgctatggccagccacaaagaaggagaggaccgtttctttcctttgtctggatctttaatttttggcaaacaaggaactggaagagacaacgtggatgcggacaaagtcatgataaccaacgaagaagaaattaaaactactaacccggtagcaacggagtcctatggacaagtggccacaaaccaccagagtgcccaagcacaggcgcagaccggctgggttcaaaaccaaggaatacttccgggtatggtttggcaggacagagatgtgtacctgcaaggacccatttgggccaaaattcctcacacggacggcaactttcacccttctccgctgatgggagggtttggaatgaagcacccgcctcctcagatcctcatcaaaaacacacctgtacctgcggatcctccaacggccttcaacaaggacaagctgaactctttcatcacccagtattctactggccaagtcagcgtggagatcgagtgggagctgcagaaggaaaacagcaagcgctggaacccggagatccagtacacttccaactattacaagtctaataatgttgaatttgctgttaatactgaaggtgtatatagtgaaccccgccccattggcaccagatacctgactcgtaatctg

SEQ ID NO: 6-10 - skipped (5 entries)

SEQ ID NO: 11 - protein, 736 aa, synthetic construct
MAADGYLPDWLEDNLSEGIREWWALKPGAPQPKANQQHQDNARGLVLPGYKYLGPGNGLDKGEPVNAADAAALEHDKAYDQQLKAGDNPYLKYNHADAEFQERLKEDTSFGGNLGRAVFQAKKRLLEPLGLVEEAAKTAPGKKRPVEQSPQEPDSSAGIGKSGAQPAKKRLNFGQTGDTESVPDPQPIGEPPAAPSGVGSLTMASGGGAPVADNNEGADGVGSSSGNWHCDSQWLGDRVITTSTRTWALPTYNNHLYKQISNSTSGGSSNDNAYFGYSTPWGYFDFNRFHCHFSPRDWQRLINNNWGFRPKRLNFKLFNIQVKEVTDNNGVKTIANNLTSTVQVFTDSDYQLPYVLGSAHEGCLPPFPADVFMIPQYGYLTLNDGSQAVGRSSFYCLEYFPSQMLRTGNNFQFSYEFENVPFHSSYAHSQSLDRLMNPLIDQYLYYLSRTINGSGQNQQTLKFSVAGPSNMAVQGRNYIPGPSYRQQRVSTTVTQNNNSEFAWPGASSWALNGRNSLMNPGPAMASHKEGEDRFFPLSGSLIFGKQGTGRDNVDADKVMITNEEEIKTTNPVATESYGQVATNHQSAQAQAQTGWVQNQGILPGMVWQDRDVYLQGPIWAKIPHTDGNFHPSPLMGGFGMKHPPPQILIKNTPVPADPPTAFNKDKLNSFITQYSTGQVSVEIEWELQKENSKRWNPEIQYTSNYYKSNNVEFAVNTEGVYSEPRPIGTRYLTRNL

SEQ ID NO: 12 - DNA, 2226 bp, synthetic construct
  source 1..2226: mol_type = other DNA
atggctgccgatggttatcttccagattggctcgaggacaaccttagtgaaggaattcgcgagtggtgggctttgaaacctggagcccctcaacccaaggcaaatcaacaacatcaagacaacgctcgaggtcttgtgcttccgggttacaaataccttggacccggcaacggactcgacaagggggagccggtcaacgcagcagacgcggcggccctcgagcacgacaaggcctacgaccagcagctcaaggccggagacaacccgtacctcaagtacaaccacgccgacgccgagttccaggagcggctcaaagaagatacgtcttttgggggcaacctcgggcgagcagtcttccaggccaaaaagaggcttcttgaacctcttggtctggttgaggaagcggctaagacggctcctggaaagaagaggcctgtagagcagtctcctcaggaaccggactcctccgcgggtattggcaaatcgggtgcacagcccgctaaaaagagactcaatttcggtcagactggcgacacagagtcagtcccagaccctcaaccaatcggagaacctcccgcagccccctcaggtgtgggatctcttacaatggcttcaggtggtggcgcaccagtggcagacaataacgaaggtgccgatggagtgggtagttcctcgggaaattggcattgcgattcccaatggctgggggacagagtcatcaccaccagcacccgaacctgggccctgcccacctacaacaatcacctctacaagcaaatctccaacagcacatctggaggatcttcaaatgacaacgcctacttcggctacagcaccccctgggggtattttgacttcaacagattccactgccacttctcaccacgtgactggcagcgactcatcaacaacaactggggattccggcctaagcgactcaacttcaagctcttcaacattcaggtcaaagaggttacggacaacaatggagtcaagaccatcgccaataaccttaccagcacggtccaggtcttcacggactcagactatcagctcccgtacgtgctcgggtcggctcacgagggctgcctcccgccgttcccagcggacgttttcatgattcctcagtacgggtatctgacgcttaatgatggaagccaggccgtgggtcgttcgtccttttactgcctggaatatttcccgtcgcaaatgctaagaacgggtaacaacttccagttcagctacgagtttgagaacgtacctttccatagcagctacgctcacagccaaagcctggaccgactaatgaatccactcatcgatcagtatctgtattacttgagtaagacggagcgtgtgtctggttctccgcattctaaggcgcagaatcagcagacgttgaagttttcggtagctggtcctagcaacatggctgtccagggaagaaactacatacctggacccagctaccgacaacaacgtgtctcaaccactgtgactcaaaacaacaacagcgaatttgcttggcctggagcttcttcttgggctctcaatggacgtaatagcttgatgaatcctggacctgctatggccagccacaaagaaggagaggaccgtttctttcctttgtctggatctttaatttttggcaaacaaggaactggaagagacaacgtggatgcggacaaagtcatgataaccaacgaagaagaaattaaaactactaacccggtagcaacggagtcctatggacaagtggccacaaaccaccagagtgcccaagcacaggcgcagaccggctgggttcaaaaccaaggaatacttccgggtatggtttggcaggacagagatgtgtacctgcaaggacccatttgggccaaaattcctcacacggacggcaactttcacccttctccgctgatgggagggtttggaatgaagcacccgcctcctcagatcctcatcaaaaacacacctgtacctgcggatcctccaacggccttcaacaaggacaagctgaactctttcatcacccagtattctactggccaagtcagcgtggagatcgagtgggagctgcagaaggaaaacagcaagcgctggaacccggagatccagtacacttccaactattacaagtctaataatgttgaatttgctgttaatactgaaggtgtatatagtgaaccccgccccattggcacgcggtatttaacgaggaactta

SEQ ID NO: 13 - DNA, 2226 bp, synthetic construct
  source 1..2226: mol_type = other DNA
atggctgccgatggttatcttccagattggctcgaggacaaccttagtgaaggaattcgcgagtggtgggctttgaaacctggagcccctcaacccaaggcaaatcaacaacatcaagacaacgctcgaggtcttgtgcttccgggttacaaataccttggacccggcaacggactcgacaagggggagccggtcaacgcagcagacgcggcggccctcgagcacgacaaggcctacgaccagcagctcaaggccggagacaacccgtacctcaagtacaaccacgccgacgccgagttccaggagcggctcaaagaagatacgtcttttgggggcaacctcgggcgagcagtcttccaggccaaaaagaggcttcttgaacctcttggtctggttgaggaagcggctaagacggctcctggaaagaagaggcctgtagagcagtctcctcaggaaccggactcctccgcgggtattggcaaatcgggtgcacagcccgctaaaaagagactcaatttcggtcagactggcgacacagagtcagtcccagaccctcaaccaatcggagaacctcccgcagccccctcaggtgtgggatctcttacaatggcttcaggtggtggcgcaccagtggcagacaataacgaaggtgccgatggagtgggtagttcctcgggaaattggcattgcgattcccaatggctgggggacagagtcatcaccaccagcacccgaacctgggccctgcccacctacaacaatcacctctacaagcaaatctccaacagcacatctggaggatcttcaaatgacaacgcctacttcggctacagcaccccctgggggtattttgacttcaacagattccactgccacttctcaccacgtgactggcagcgactcatcaacaacaactggggattccggcctaagcgactcaacttcaagctcttcaacattcaggtcaaagaggttacggacaacaatggagtcaagaccatcgccaataaccttaccagcacggtccaggtcttcacggactcagactatcagctcccgtacgtgctcgggtcggctcacgagggctgcctcccgccgttcccagcggacgttttcatgattcctcagtacgggtatctgacgcttaatgatggaagccaggccgtgggtcgttcgtccttttactgcctggaatatttcccgtcgcaaatgctaagaacgggtaacaacttccagttcagctacgagtttgagaacgtacctttccatagcagctacgctcacagccaaagcctggaccgactaatgaatccactcatcgatcagtatctgtattacttgagtaaggcggagattggtcatgattctccgcataagtctggtcagaatcagcagacgttgaagttttcggtagctggtcctagcaacatggctgtccagggaagaaactacatacctggacccagctaccgacaacaacgtgtctcaaccactgtgactcaaaacaacaacagcgaatttgcttggcctggagcttcttcttgggctctcaatggacgtaatagcttgatgaatcctggacctgctatggccagccacaaagaaggagaggaccgtttctttcctttgtctggatctttaatttttggcaaacaaggaactggaagagacaacgtggatgcggacaaagtcatgataaccaacgaagaagaaattaaaactactaacccggtagcaacggagtcctatggacaagtggccacaaaccaccagagtgcccaagcacaggcgcagaccggctgggttcaaaaccaaggaatacttccgggtatggtttggcaggacagagatgtgtacctgcaaggacccatttgggccaaaattcctcacacggacggcaactttcacccttctccgctgatgggagggtttggaatgaagcacccgcctcctcagatcctcatcaaaaacacacctgtacctgcggatcctccaacggccttcaacaaggacaagctgaactctttaatcacccagtattctactggccaagtcagcgtggagatcgagtgggagctgcagaaggaaaacagcaagcgctggaacccggagatccagtacacttccaactattacaagtctaataatgttgaatttgctgttaatactgaaggtgtatatagtgaaccccgccccattggcacgcggtatttaacgaggaactta

SEQ ID NO: 14 - DNA, 2226 bp, synthetic construct
  source 1..2226: mol_type = other DNA
atggctgccgatggttatcttccagattggctcgaggacaaccttagtgaaggaattcgcgagtggtgggctttgaaacctggagcccctcaacccaaggcaaatcaacaacatcaagacaacgctcgaggtcttgtgcttccgggttacaaataccttggacccggcaacggactcgacaagggggagccggtcaacgcagcagacgcggcggccctcgagcacgacaaggcctacgaccagcagctcaaggccggagacaacccgtacctcaagtacaaccacgccgacgccgagttccaggagcggctcaaagaagatacgtcttttgggggcaacctcgggcgagcagtcttccaggccaaaaagaggcttcttgaacctcttggtctggttgaggaagcggctaagacggctcctggaaagaagaggcctgtagagcagtctcctcaggaaccggactcctccgcgggtattggcaaatcgggtgcacagcccgctaaaaagagactcaatttcggtcagactggcgacacagagtcagtcccagaccctcaaccaatcggagaacctcccgcagccccctcaggtgtgggatctcttacaatggcttcaggtggtggcgcaccagtggcagacaataacgaaggtgccgatggagtgggtagttcctcgggaaattggcattgcgattcccaatggctgggggacagagtcatcaccaccagcacccgaacctgggccctgcccacctacaacaatcacctctacaagcaaatctccaacagcacatctggaggatcttcaaatgacaacgcctacttcggctacagcaccccctgggggtattttgacttcaacagattccactgccacttctcaccacgtgactggcagcgactcatcaacaacaactggggattccggcctaagcgactcaacttcaagctcttcaacattcaggtcaaagaggttacggacaacaatggagtcaagaccatcgccaataaccttaccagcacggtccaggtcttcacggactcagactatcagctcccgtacgtgctcgggtcggctcacgagggctgcctcccgccgttcccagcggacgttttcatgattcctcagtacgggtatctgacgcttaatgatggaagccaggccgtgggtcgttcgtccttttactgcctggaatatttcccgtcgcaaatgctaagaacgggtaacaacttccagttcagctacgagtttgagaacgtacctttccatagcagctacgctcacagccaaagcctggaccgactaatgaatccactcatcgatcagtatctgtattacttgagtaagacgattattggttctggttctccgcattctaaggcgcagaatcgtcatacgttgaagttttcggtagctggtcctagcaacatggctgtccagggaagaaactacatacctggacccagctaccgacaacaacgtgtctcaaccactgtgactcaaaacaacaacagcgaatttgcttggcctggagcttcttcttgggctctcaatggacgtaatagcttgatgaatcctggacctgctatggccagccacaaagaaggagaggaccgtttctttcctttgtctggatctttaatttttggcaaacaaggaactggaagagacaacgtggatgcggacaaagtcatgataaccaacgaagaagaaattaaaactactaacccggtagcaacggagtcctatggacaagtggccacaaaccaccagagtgcccaagcacaggcgcagaccggctgggttcaaaaccaaggaatacttccgggtatggtttggcaggacagagatgtgtacctgcaaggacccatttgggccaaaattcctcacacggacggcaactttcacccttctccgctgatgggagggtttggaatgaagcacccgcctcctcagatcctcatcaaaaacacacctgtacctgcggatcctccaacggccttcaacaaggacaagctgaactctttcatcacccagtattctactggccaagtcagcgtggagatcgagtgggagctgcagaaggaaaacagcaagcgctggaacccggagatccagtacacttccaactattacaagtctaataatgttgaatttgctgttaatactgaaggtgtatatagtgaaccccgccccattggcacgcggtatttaacgaggaactta

SEQ ID NO: 15 - DNA, 2226 bp, synthetic construct
  source 1..2226: mol_type = other DNA
atggctgccgatggttatcttccagattggctcgaggacaaccttagtgaaggaattcgcgagtggtgggctttgaaacctggagcccctcaacccaaggcaaatcaacaacatcaagacaacgctcgaggtcttgtgcttccgggttacaaataccttggacccggcaacggactcgacaagggggagccggtcaacgcagcagacgcggcggccctcgagcacgacaaggcctacgaccagcagctcaaggccggagacaacccgtacctcaagtacaaccacgccgacgccgagttccaggagcggctcaaagaagatacgtcttttgggggcaacctcgggcgagcagtcttccaggccaaaaagaggcttcttgaacctcttggtctggttgaggaagcggctaagacggctcctggaaagaagaggcctgtagagcagtctcctcaggaaccggactcctccgcgggtattggcaaatcgggtgcacagcccgctaaaaagagactcaatttcggtcagactggcgacacagagtcagtcccagaccctcaaccaatcggagaacctcccgcagccccctcaggtgtgggatctcttacaatggcttcaggtggtggcgcaccagtggcagacaataacgaaggtgccgatggagtgggtagttcctcgggaaattggcattgcgattcccaatggctgggggacagagtcatcaccaccagcacccgaacctgggccctgcccacctacaacaatcacctctacaagcaaatctccaacagcacatctggaggatcttcaaatgacaacgcctacttcggctacagcaccccctgggggtattttgacttcaacagattccactgccacttctcaccacgtgactggcagcgactcatcaacaacaactggggattccggcctaagcgactcaacttcaagctcttcaacattcaggtcaaagaggttacggacaacaatggagtcaagaccatcgccaataaccttaccagcacggtccaggtcttcacggactcagactatcagctcccgtacgtgctcgggtcggctcacgagggctgcctcccgccgttcccagcggacgttttcatgattcctcagtacgggtatctgacgcttaatgatggaagccaggccgtgggtcgttcgtccttttactgcctggaatatttcccgtcgcaaatgctaagaacgggtaacaacttccagttcagctacgagtttgagaacgtacctttccatagcagctacgctcacagccaaagcctggaccgactaatgaatccactcatcgatcagtatctgtattacttgagtaagacggagaagatgtctggttctccgcattctaaggcgcagaatcagcagacgttgaagttttcggtagctggtcctagcaacatggctgtccagggaagaaactacatacctggacccagctaccgacaacaacgtgtctcaaccactgtgactcaaaacaacaacagcgaatttgcttggcctggagcttcttcttgggctctcaatggacgtaatagcttgatgaatcctggacctgctatggccagccacaaagaaggagaggaccgtttctttcctttgtctggatctttaatttttggcaaacaaggaactggaagagacaacgtggatgcggacaaagtcatgataaccaacgaagaagaaattaaaactactaacccggtagcaacggagtcctatggacaagtggccacaaaccaccagagtgcccaagcacaggcgcagaccggctgggttcaaaaccaaggaatacttccgggtatggtttggcaggacagagatgtgtacctgcaaggacccatttgggccaaaattcctcacacggacggcaactttcacccttctccgctgatgggagggtttggaatgaagcacccgcctcctcagatcctcatcaaaaacacacctgtacctgcggatcctccaacggccttcaacaaggacaagctgaactctttcatcacccagtattctactggccaagtcagcgtggagatcgagtgggagctgcagaaggaaaacagcaagcgctggaacccggagatccagtacacttccaactattacaagtctaataatgttgaatttgctgttaatactgaaggtgtatatagtgaaccccgccccattggcacgcggtatttaacgaggaactta

SEQ ID NO: 16 - DNA, 2226 bp, synthetic construct
  source 1..2226: mol_type = other DNA
atggctgccgatggttatcttccagattggctcgaggacaaccttagtgaaggaattcgcgagtggtgggctttgaaacctggagcccctcaacccaaggcaaatcaacaacatcaagacaacgctcgaggtcttgtgcttccgggttacaaataccttggacccggcaacggactcgacaagggggagccggtcaacgcagcagacgcggcggccctcgagcacgacaaggcctacgaccagcagctcaaggccggagacaacccgtacctcaagtacaaccacgccgacgccgagttccaggagcggctcaaagaagatacgtcttttgggggcaacctcgggcgagcagtcttccaggccaaaaagaggcttcttgaacctcttggtctggttgaggaagcggctaagacggctcctggaaagaagaggcctgtagagcagtctcctcaggaaccggactcctccgcgggtattggcaaatcgggtgcacagcccgctaaaaagagactcaatttcggtcagactggcgacacagagtcagtcccagaccctcaaccaatcggagaacctcccgcagccccctcaggtgtgggatctcttacaatggcttcaggtggtggcgcaccagtggcagacaataacgaaggtgccgatggagtgggtagttcctcgggaaattggcattgcgattcccaatggctgggggacagagtcatcaccaccagcacccgaacctgggccctgcccacctacaacaatcacctctacaagcaaatctccaacagcacatctggaggatcttcaaatgacaacgcctacttcggctacagcaccccctgggggtattttgacttcaacagattccactgccacttctcaccacgtgactggcagcgactcatcaacaacaactggggattccggcctaagcgactcaacttcaagctcttcaacattcaggtcaaagaggttacggacaacaatggagtcaagaccatcgccaataaccttaccagcacggtccaggtcttcacggactcagactatcagctcccgtacgtgctcgggtcggctcacgagggctgcctcccgccgttcccagcggacgttttcatgattcctcagtacgggtatctgacgcttaatgatggaagccaggccgtgggtcgttcgtccttttactgcctggaatatttcccgtcgcaaatgctaagaacgggtaacaacttccagttcagctacgagtttgagaacgtacctttccatagcagctacgctcacagccaaagcctggaccgactaatgaatccactcatcgatcagtatctgtattacttgagtaaggagattaatggtcgtggttctccgcattctaaggcgcagaatcagcagacgttgaagttttcggtagctggtcctagcaacatggctgtccagggaagaaactacatacctggacccagctaccgacaacaacgtgtctcaaccactgtgactcaaaacaacaacagcgaatttgcttggcctggagcttcttcttgggctctcaatggacgtaatagcttgatgaatcctggacctgctatggccagccacaaagaaggagaggaccgtttctttcctttgtctggatctttaatttttggcaaacaaggaactggaagagacaacgtggatgcggacaaagtcatgataaccaacgaagaagaaattaaaactactaacccggtagcaacggagtcctatggacaagtggccacaaaccaccagagtgcccaagcacaggcgcagaccggctgggttcaaaaccaaggaatacttccgggtatggtttggcaggacagagatgtgtacctgcaaggacccatttgggccaaaattcctcacacggacggcaactttcacccttctccgctgatgggagggtttggaatgaagcacccgcctcctcagatcctcatcaaaaacacacctgtacctgcggatcctccaacggccttcaacaaggacaagctgaactctttcatcacccagtattctactggccaagtcagcgtggagatcgagtgggagctgcagaaggaaaacagcaagcgctggaacccggagatccagtacacttccaactattacaagtctaataatgttgaatttgctgttaatactgaaggtgtatatagtgaaccccgccccattggcacgcggtatttaacgaggaactta

SEQ ID NO: 17 - DNA, 2226 bp, synthetic construct
  source 1..2226: mol_type = other DNA
atggctgccgatggttatcttccagattggctcgaggacaaccttagtgaaggaattcgcgagtggtgggctttgaaacctggagcccctcaacccaaggcaaatcaacaacatcaagacaacgctcgaggtcttgtgcttccgggttacaaataccttggacccggcaacggactcgacaagggggagccggtcaacgcagcagacgcggcggccctcgagcacgacaaggcctacgaccagcagctcaaggccggagacaacccgtacctcaagtacaaccacgccgacgccgagttccaggagcggctcaaagaagatacgtcttttgggggcaacctcgggcgagcagtcttccaggccaaaaagaggcttcttgaacctcttggtctggttgaggaagcggctaagacggctcctggaaagaagaggcctgtagagcagtctcctcaggaaccggactcctccgcgggtattggcaaatcgggtgcacagcccgctaaaaagagactcaatttcggtcagactggcgacacagagtcagtcccagaccctcaaccaatcggagaacctcccgcagccccctcaggtgtgggatctcttacaatggcttcaggtggtggcgcaccagtggcagacaataacgaaggtgccgatggagtgggtagttcctcgggaaattggcattgcgattcccaatggctgggggacagagtcatcaccaccagcacccgaacctgggccctgcccacctacaacaatcacctctacaagcaaatctccaacagcacatctggaggatcttcaaatgacaacgcctacttcggctacagcaccccctgggggtattttgacttcaacagattccactgccacttctcaccacgtgactggcagcgactcatcaacaacaactggggattccggcctaagcgactcaacttcaagctcttcaacattcaggtcaaagaggttacggacaacaatggagtcaagaccatcgccaataaccttaccagcacggtccaggtcttcacggactcagactatcagctcccgtacgtgctcgggtcggctcacgagggctgcctcccgccgttcccagcggacgttttcatgattcctcagtacgggtatctgacgcttaatgatggaagccaggccgtgggtcgttcgtccttttactgcctggaatatttcccgtcgcaaatgctaagaacgggtaacaacttccagttcagctacgagtttgagaacgtacctttccatagcagctacgctcacagccaaagcctggaccgactaatgaatccactcatcgatcagtatctgtattacttgagtaagacgtttaatggttctggttctccgcattctaaggcgccgaatctgcagacgttgaagttttcggtagctggtcctagcaacatggctgtccagggaagaaactacatacctggacccagctaccgacaacaacgtgtctcaaccactgtgactcaaaacaacaacagcgaatttgcttggcctggagcttcttcttgggctctcaatggacgtaatagcttgatgaatcctggacctgctatggccagccacaaagaaggagaggaccgtttctttcctttgtctggatctttaatttttggcaaacaaggaactggaagagacaacgtggatgcggacaaagtcatgataaccaacgaagaagaaattaaaactactaacccggtagcaacggagtcctatggacaagtggccacaaaccaccagagtgcccaagcacaggcgcagaccggctgggttcaaaaccaaggaatacttccgggtatggtttggcaggacagagatgtgtacctgcaaggacccatttgggccaaaattcctcacacggacggcaactttcacccttctccgctgatgggagggtttggaatgaagcacccgcctcctcagatcctcatcaaaaacacacctgtacctgcggatcctccaacggccttcaacaaggacaagctgaactctttcatcacccagtattctactggccaagtcagcgtggagatcgagtgggagctgcagaaggaaaacagcaagcgctggaacccggagatccagtacacttccaactattacaagtctaataatgttgaatttgctgttaatactgaaggtgtatatagtgaaccccgccccattggcacgcggtatttaacgaggaactta

SEQ ID NO: 18 - DNA, 2226 bp, synthetic construct
  source 1..2226: mol_type = other DNA
atggctgccgatggttatcttccagattggctcgaggacaaccttagtgaaggaattcgcgagtggtgggctttgaaacctggagcccctcaacccaaggcaaatcaacaacatcaagacaacgctcgaggtcttgtgcttccgggttacaaataccttggacccggcaacggactcgacaagggggagccggtcaacgcagcagacgcggcggccctcgagcacgacaaggcctacgaccagcagctcaaggccggagacaacccgtacctcaagtacaaccacgccgacgccgagttccaggagcggctcaaagaagatacgtcttttgggggcaacctcgggcgagcagtcttccaggccaaaaagaggcttcttgaacctcttggtctggttgaggaagcggctaagacggctcctggaaagaagaggcctgtagagcagtctcctcaggaaccggactcctccgcgggtattggcaaatcgggtgcacagcccgctaaaaagagactcaatttcggtcagactggcgacacagagtcagtcccagaccctcaaccaatcggagaacctcccgcagccccctcaggtgtgggatctcttacaatggcttcaggtggtggcgcaccagtggcagacaataacgaaggtgccgatggagtgggtagttcctcgggaaattggcattgcgattcccaatggctgggggacagagtcatcaccaccagcacccgaacctgggccctgcccacctacaacaatcacctctacaagcaaatctccaacagcacatctggaggatcttcaaatgacaacgcctacttcggctacagcaccccctgggggtattttgacttcaacagattccactgccacttctcaccacgtgactggcagcgactcatcaacaacaactggggattccggcctaagcgactcaacttcaagctcttcaacattcaggtcaaagaggttacggacaacaatggagtcaagaccatcgccaataaccttaccagcacggtccaggtcttcacggactcagactatcagctcccgtacgtgctcgggtcggctcacgagggctgcctcccgccgttcccagcggacgttttcatgattcctcagtacgggtatctgacgcttaatgatggaagccaggccgtgggtcgttcgtccttttactgcctggaatatttcccgtcgcaaatgctaagaacgggtaacaacttccagttcagctacgagtttgagaacgtacctttccatagcagctacgctcacagccaaagcctggaccgactaatgaatccactcatcgatcagtatctgtattacttgagtaagacggagaagacgtctggttctccgcattctaaggcgcagaatcagcagacgttgaagttttcggtagctggtcctagcaacatggctgtccagggaagaaactacatacctggacccagctaccgacaacaacgtgtctcaaccactgtgactcaaaacaacaacagcgaatttgcttggcctggagcttcttcttgggctctcaatggacgtaatagcttgatgaatcctggacctgctatggccagccacaaagaaggagaggaccgtttctttcctttgtctggatctttaatttttggcaaacaaggaactggaagagacaacgtggatgcggacaaagtcatgataaccaacgaagaagaaattaaaactactaacccggtagcaacggagtcctatggacaagtggccacaaaccaccagagtgcccaagcacaggcgcagaccggctgggttcaaaaccaaggaatacttccgggtatggtttggcaggacagagatgtgtacctgcaaggacccatttgggccaaaattcctcacacggacggcaactttcacccttctccgctgatgggagggtttggaatgaagcacccgcctcctcagatcctcatcaaaaacacacctgtacctgcggatcctccaacggccttcaacaaggacaagctgaactctttcatcacccagtattctactggccaagtcagcgtggagatcgagtgggagctgcagaaggaaaacagcaagcgctggaacccggagatccagtacacttccaactattacaagtctaataatgttgaatttgctgttaatactgaaggtgtatatagtgaaccccgccccattggcacgcggtatttaacgaggaactta

SEQ ID NO: 19 - DNA, 2226 bp, synthetic construct
  source 1..2226: mol_type = other DNA
atggctgccgatggttatcttccagattggctcgaggacaaccttagtgaaggaattcgcgagtggtgggctttgaaacctggagcccctcaacccaaggcaaatcaacaacatcaagacaacgctcgaggtcttgtgcttccgggttacaaataccttggacccggcaacggactcgacaagggggagccggtcaacgcagcagacgcggcggccctcgagcacgacaaggcctacgaccagcagctcaaggccggagacaacccgtacctcaagtacaaccacgccgacgccgagttccaggagcggctcaaagaagatacgtcttttgggggcaacctcgggcgagcagtcttccaggccaaaaagaggcttcttgaacctcttggtctggttgaggaagcggctaagacggctcctggaaagaagaggcctgtagagcagtctcctcaggaaccggactcctccgcgggtattggcaaatcgggtgcacagcccgctaaaaagagactcaatttcggtcagactggcgacacagagtcagtcccagaccctcaaccaatcggagaacctcccgcagccccctcaggtgtgggatctcttacaatggcttcaggtggtggcgcaccagtggcagacaataacgaaggtgccgatggagtgggtagttcctcgggaaattggcattgcgattcccaatggctgggggacagagtcatcaccaccagcacccgaacctgggccctgcccacctacaacaatcacctctacaagcaaatctccaacagcacatctggaggatcttcaaatgacaacgcctacttcggctacagcaccccctgggggtattttgacttcaacagattccactgccacttctcaccacgtgactggcagcgactcatcaacaacaactggggattccggcctaagcgactcaacttcaagctcttcaacattcaggtcaaagaggttacggacaacaatggagtcaagaccatcgccaataaccttaccagcacggtccaggtcttcacggactcagactatcagctcccgtacgtgctcgggtcggctcacgagggctgcctcccgccgttcccagcggacgttttcatgattcctcagtacgggtatctgacgcttaatgatggaagccaggccgtgggtcgttcgtccttttactgcctggaatatttcccgtcgcaaatgctaagaacgggtaacaacttccagttcagctacgagtttgagaacgtacctttccatagcagctacgctcacagccaaagcctggaccgactaatgaatccactcatcgatcagtatctgtattacttgagtaagacgatgaatggtcatgattctccgcattctaaggcgcagaatcagcagacgttgaagttttcggtagctggtcctagcaacatggctgtccagggaagaaactacatacctggacccagctaccgacaacaacgtgtctcaaccactgtgactcaaaacaacaacagcgaatttgcttggcctggagcttcttcttgggctctcaatggacgtaatagcttgatgaatcctggacctgctatggccagccacaaagaaggagaggaccgtttctttcctttgtctggatctttaatttttggcaaacaaggaactggaagagacaacgtggatgcggacaaagtcatgataaccaacgaagaagaaattaaaactactaacccggtagcaacggagtcctatggacaagtggccacaaaccaccagagtgcccaagcacaggcgcagaccggctgggttcaaaaccaaggaatacttccgggtatggtttggcaggacagagatgtgtacctgcaaggacccatttgggccaaaattcctcacacggacggcaactttcacccttctccgctgatgggagggtttggaatgaagcacccgcctcctcagatcctcatcaaaaacacacctgtacctgcggatcctccaacggccttcaacaaggacaagctgaactctttcatcacccagtattctactggccaagtcagcgtggagatcgagtgggagctgcagaaggaaaacagcaagcgctggaacccggagatccagtacacttccaactattacaagtctaataatgttgaatttgctgttaatactgaaggtgtatatagtgaaccccgccccattggcacgcggtatttaacgaggaactta

SEQ ID NO: 20 - DNA, 2226 bp, synthetic construct
  source 1..2226: mol_type = other DNA
atggctgccgatggttatcttccagattggctcgaggacaaccttagtgaaggaattcgcgagtggtgggctttgaaacctggagcccctcaacccaaggcaaatcaacaacatcaagacaacgctcgaggtcttgtgcttccgggttacaaataccttggacccggcaacggactcgacaagggggagccggtcaacgcagcagacgcggcggccctcgagcacgacaaggcctacgaccagcagctcaaggccggagacaacccgtacctcaagtacaaccacgccgacgccgagttccaggagcggctcaaagaagatacgtcttttgggggcaacctcgggcgagcagtcttccaggccaaaaagaggcttcttgaacctcttggtctggttgaggaagcggctaagacggctcctggaaagaagaggcctgtagagcagtctcctcaggaaccggactcctccgcgggtattggcaaatcgggtgcacagcccgctaaaaagagactcaatttcggtcagactggcgacacagagtcagtcccagaccctcaaccaatcggagaacctcccgcagccccctcaggtgtgggatctcttacaatggcttcaggtggtggcgcaccagtggcagacaataacgaaggtgccgatggagtgggtagttcctcgggaaattggcattgcgattcccaatggctgggggacagagtcatcaccaccagcacccgaacctgggccctgcccacctacaacaatcacctctacaagcaaatctccaacagcacatctggaggatcttcaaatgacaacgcctacttcggctacagcaccccctgggggtattttgacttcaacagattccactgccacttctcaccacgtgactggcagcgactcatcaacaacaactggggattccggcctaagcgactcaacttcaagctcttcaacattcaggtcaaagaggttacggacaacaatggagtcaagaccatcgccaataaccttaccagcacggtccaggtcttcacggactcagactatcagctcccgtacgtgctcgggtcggctcacgagggctgcctcccgccgttcccagcggacgttttcatgattcctcagtacgggtatctgacgcttaatgatggaagccaggccgtgggtcgttcgtccttttactgcctggaatatttcccgtcgcaaatgctaagaacgggtaacaacttccagttcagctacgagtttgagaacgtacctttccatagcagctacgctcacagccaaagcctggaccgactaatgaatccactcatcgatcagtatctgtattacttgagtaagacgattgatggtcatgattctccgcattctaaggcgcagaatcagcagacgttgaagttttcggtagctggtcctagcaacatggctgtccagggaagaaactacatacctggacccagctaccgacaacaacgtgtctcaaccactgtgactcaaaacaacaacagcgaatttgcttggcctggagcttcttcttgggctctcaatggacgtaatagcttgatgaatcctggacctgctatggccagccacaaagaaggagaggaccgtttctttcctttgtctggatctttaatttttggcaaacaaggaactggaagagacaacgtggatgcggacaaagtcatgataaccaacgaagaagaaattaaaactactaacccggtagcaacggagtcctatggacaagtggccacaaaccaccagagtgcccaagcacaggcgcagaccggctgggttcaaaaccaaggaatacttccgggtatggtttggcaggacagagatgtgtacctgcaaggacccatttgggccaaaattcctcacacggacggcaactttcacccttctccgctgatgggagggtttggaatgaagcacccgcctcctcagatcctcatcaaaaacacacctgtacctgcggatcctccaacggccttcaacaaggacaagctgaactctttcatcacccagtattctactggccaagtcagcgtggagatcgagtgggagctgcagaaggaaaacagcaagcgctggaacccggagatccagtacacttccaactattacaagtctaataatgttgaatttgctgttaatactgaaggtgtatatagtgaaccccgccccattggcacgcggtatttaacgaggaactta

SEQ ID NO: 21 - DNA, 2226 bp, synthetic construct
  source 1..2226: mol_type = other DNA
atggctgccgatggttatcttccagattggctcgaggacaaccttagtgaaggaattcgcgagtggtgggctttgaaacctggagcccctcaacccaaggcaaatcaacaacatcaagacaacgctcgaggtcttgtgcttccgggttacaaataccttggacccggcaacggactcgacaagggggagccggtcaacgcagcagacgcggcggccctcgagcacgacaaggcctacgaccagcagctcaaggccggagacaacccgtacctcaagtacaaccacgccgacgccgagttccaggagcggctcaaagaagatacgtcttttgggggcaacctcgggcgagcagtcttccaggccaaaaagaggcttcttgaacctcttggtctggttgaggaagcggctaagacggctcctggaaagaagaggcctgtagagcagtctcctcaggaaccggactcctccgcgggtattggcaaatcgggtgcacagcccgctaaaaagagactcaatttcggtcagactggcgacacagagtcagtcccagaccctcaaccaatcggagaacctcccgcagccccctcaggtgtgggatctcttacaatggcttcaggtggtggcgcaccagtggcagacaataacgaaggtgccgatggagtgggtagttcctcgggaaattggcattgcgattcccaatggctgggggacagagtcatcaccaccagcacccgaacctgggccctgcccacctacaacaatcacctctacaagcaaatctccaacagcacatctggaggatcttcaaatgacaacgcctacttcggctacagcaccccctgggggtattttgacttcaacagattccactgccacttctcaccacgtgactggcagcgactcatcaacaacaactggggattccggcctaagcgactcaacttcaagctcttcaacattcaggtcaaagaggttacggacaacaatggagtcaagaccatcgccaataaccttaccagcacggtccaggtcttcacggactcagactatcagctcccgtacgtgctcgggtcggctcacgagggctgcctcccgccgttcccagcggacgttttcatgattcctcagtacgggtatctgacgcttaatgatggaagccaggccgtgggtcgttcgtccttttactgcctggaatatttcccgtcgcaaatgctaagaacgggtaacaacttccagttcagctacgagtttgagaacgtacctttccatagcagctacgctcacagccaaagcctggaccgactaatgaatccactcatcgatcagtatctgtattacttgagtaagacgaataatggtcatgattctccgcattctaaggcgcagaatcagcagacgttgaagttttcggtagctggtcctagcaacatggctgtccagggaagaaactacatacctggacccagctaccgacaacaacgtgtctcaaccactgtgactcaaaacaacaacagcgaatttgcttggcctggagcttcttcttgggctctcaatggacgtaatagcttgatgaatcctggacctgctatggccagccacaaagaaggagaggaccgtttctttcctttgtctggatctttaatttttggcaaacaaggaactggaagagacaacgtggatgcggacaaagtcatgataaccaacgaagaagaaattaaaactactaacccggtagcaacggagtcctatggacaagtggccacaaaccaccagagtgcccaagcacaggcgcagaccggctgggttcaaaaccaaggaatacttccgggtatggtttggcaggacagagatgtgtacctgcaaggacccatttgggccaaaattcctcacacggacggcaactttcacccttctccgctgatgggagggtttggaatgaagcacccgcctcctcagatcctcatcaaaaacacacctgtacctgcggatcctccaacggccttcaacaaggacaagctgaactctttcatcacccagtattctactggccaagtcagcgtggagatcgagtgggagctgcagaaggaaaacagcaagcgctggaacccggagatccagtacacttccaactattacaagtctaataatgttgaatttgctgttaatactgaaggtgtatatagtgaaccccgccccattggcacgcggtatttaacgaggaactta

SEQ ID NO: 22 - DNA, 2226 bp, synthetic construct
  source 1..2226: mol_type = other DNA
atggctgccgatggttatcttccagattggctcgaggacaaccttagtgaaggaattcgcgagtggtgggctttgaaacctggagcccctcaacccaaggcaaatcaacaacatcaagacaacgctcgaggtcttgtgcttccgggttacaaataccttggacccggcaacggactcgacaagggggagccggtcaacgcagcagacgcggcggccctcgagcacgacaaggcctacgaccagcagctcaaggccggagacaacccgtacctcaagtacaaccacgccgacgccgagttccaggagcggctcaaagaagatacgtcttttgggggcaacctcgggcgagcagtcttccaggccaaaaagaggcttcttgaacctcttggtctggttgaggaagcggctaagacggctcctggaaagaagaggcctgtagagcagtctcctcaggaaccggactcctccgcgggtattggcaaatcgggtgcacagcccgctaaaaagagactcaatttcggtcagactggcgacacagagtcagtcccagaccctcaaccaatcggagaacctcccgcagccccctcaggtgtgggatctcttacaatggcttcaggtggtggcgcaccagtggcagacaataacgaaggtgccgatggagtgggtagttcctcgggaaattggcattgcgattcccaatggctgggggacagagtcatcaccaccagcacccgaacctgggccctgcccacctacaacaatcacctctacaagcaaatctccaacagcacatctggaggatcttcaaatgacaacgcctacttcggctacagcaccccctgggggtattttgacttcaacagattccactgccacttctcaccacgtgactggcagcgactcatcaacaacaactggggattccggcctaagcgactcaacttcaagctcttcaacattcaggtcaaagaggttacggacaacaatggagtcaagaccatcgccaataaccttaccagcacggtccaggtcttcacggactcagactatcagctcccgtacgtgctcgggtcggctcacgagggctgcctcccgccgttcccagcggacgttttcatgattcctcagtacgggtatctgacgcttaatgatggaagccaggccgtgggtcgttcgtccttttactgcctggaatatttcccgtcgcaaatgctaagaacgggtaacaacttccagttcagctacgagtttgagaacgtacctttccatagcagctacgctcacagccaaagcctggaccgactaatgaatccactcatcgatcagtatctgtattacttgagtaagacgcagcgtaagtctggttctccgcattctaaggcgcagaatcagcagacgttgaagttttcggtagctggtcctagcaacatggctgtccagggaagaaactacatacctggacccagctaccgacaacaacgtgtctcaaccactgtgactcaaaacaacaacagcgaatttgcttggcctggagcttcttcttgggctctcaatggacgtaatagcttgatgaatcctggacctgctatggccagccacaaagaaggagaggaccgtttctttcctttgtctggatctttaatttttggcaaacaaggaactggaagagacaacgtggatgcggacaaagtcatgataaccaacgaagaagaaattaaaactactaacccggtagcaacggagtcctatggacaagtggccacaaaccaccagagtgcccaagcacaggcgcagaccggctgggttcaaaaccaaggaatacttccgggtatggtttggcaggacagagatgtgtacctgcaaggacccatttgggccaaaattcctcacacggacggcaactttcacccttctccgctgatgggagggtttggaatgaagcacccgcctcctcagatcctcatcaaaaacacacctgtacctgcggatcctccaacggccttcaacaaggacaagctgaactctttcatcacccagtattctactggccaagtcagcgtggagatcgagtgggagctgcagaaggaaaacagcaagcgctggaacccggagatccagtacacttccaactattacaagtctaataatgttgaatttgctgttaatactgaaggtgtatatagtgaaccccgccccattggcacgcggtatttaacgaggaactta

SEQ ID NO: 23 - DNA, 2226 bp, synthetic construct
  source 1..2226: mol_type = other DNA
atggctgccgatggttatcttccagattggctcgaggacaaccttagtgaaggaattcgcgagtggtgggctttgaaacctggagcccctcaacccaaggcaaatcaacaacatcaagacaacgctcgaggtcttgtgcttccgggttacaaataccttggacccggcaacggactcgacaagggggagccggtcaacgcagcagacgcggcggccctcgagcacgacaaggcctacgaccagcagctcaaggccggagacaacccgtacctcaagtacaaccacgccgacgccgagttccaggagcggctcaaagaagatacgtcttttgggggcaacctcgggcgagcagtcttccaggccaaaaagaggcttcttgaacctcttggtctggttgaggaagcggctaagacggctcctggaaagaagaggcctgtagagcagtctcctcaggaaccggactcctccgcgggtattggcaaatcgggtgcacagcccgctaaaaagagactcaatttcggtcagactggcgacacagagtcagtcccagaccctcaaccaatcggagaacctcccgcagccccctcaggtgtgggatctcttacaatggcttcaggtggtggcgcaccagtggcagacaataacgaaggtgccgatggagtgggtagttcctcgggaaattggcattgcgattcccaatggctgggggacagagtcatcaccaccagcacccgaacctgggccctgcccacctacaacaatcacctctacaagcaaatctccaacagcacatctggaggatcttcaaatgacaacgcctacttcggctacagcaccccctgggggtattttgacttcaacagattccactgccacttctcaccacgtgactggcagcgactcatcaacaacaactggggattccggcctaagcgactcaacttcaagctcttcaacattcaggtcaaagaggttacggacaacaatggagtcaagaccatcgccaataaccttaccagcacggtccaggtcttcacggactcagactatcagctcccgtacgtgctcgggtcggctcacgagggctgcctcccgccgttcccagcggacgttttcatgattcctcagtacgggtatctgacgcttaatgatggaagccaggccgtgggtcgttcgtccttttactgcctggaatatttcccgtcgcaaatgctaagaacgggtaacaacttccagttcagctacgagtttgagaacgtacctttccatagcagctacgctcacagccaaagcctggaccgactaatgaatccactcatcgatcagtatctgtattacttgagtaagacgattaatggttctggttctccgcattctaaggcgcaggcgcgtaagacgttgaagttttcggtagctggtcctagcaacatggctgtccagggaagaaactacatacctggacccagctaccgacaacaacgtgtctcaaccactgtgactcaaaacaacaacagcgaatttgcttggcctggagcttcttcttgggctctcaatggacgtaatagcttgatgaatcctggacctgctatggccagccacaaagaaggagaggaccgtttctttcctttgtctggatctttaatttttggcaaacaaggaactggaagagacaacgtggatgcggacaaagtcatgataaccaacgaagaagaaattaaaactactaacccggtagcaacggagtcctatggacaagtggccacaaaccaccagagtgcccaagcacaggcgcagaccggctgggttcaaaaccaaggaatacttccgggtatggtttggcaggacagagatgtgtacctgcaaggacccatttgggccaaaattcctcacacggacggcaactttcacccttctccgctgatgggagggtttggaatgaagcacccgcctcctcagatcctcatcaaaaacacacctgtacctgcggatcctccaacggccttcaacaaggacaagctgaactctttcatcacccagtattctactggccaagtcagcgtggagatcgagtgggagctgcagaaggaaaacagcaagcgctggaacccggagatccagtacacttccaactattacaagtctaataatgttgaatttgctgttaatactgaaggtgtatatagtgaaccccgccccattggcacgcggtatttaacgaggaactta

SEQ ID NO: 24 - DNA, 2226 bp, synthetic construct
  source 1..2226: mol_type = other DNA
atggctgccgatggttatcttccagattggctcgaggacaaccttagtgaaggaattcgcgagtggtgggctttgaaacctggagcccctcaacccaaggcaaatcaacaacatcaagacaacgctcgaggtcttgtgcttccgggttacaaataccttggacccggcaacggactcgacaagggggagccggtcaacgcagcagacgcggcggccctcgagcacgacaaggcctacgaccagcagctcaaggccggagacaacccgtacctcaagtacaaccacgccgacgccgagttccaggagcggctcaaagaagatacgtcttttgggggcaacctcgggcgagcagtcttccaggccaaaaagaggcttcttgaacctcttggtctggttgaggaagcggctaagacggctcctggaaagaagaggcctgtagagcagtctcctcaggaaccggactcctccgcgggtattggcaaatcgggtgcacagcccgctaaaaagagactcaatttcggtcagactggcgacacagagtcagtcccagaccctcaaccaatcggagaacctcccgcagccccctcaggtgtgggatctcttacaatggcttcaggtggtggcgcaccagtggcagacaataacgaaggtgccgatggagtgggtagttcctcgggaaattggcattgcgattcccaatggctgggggacagagtcatcaccaccagcacccgaacctgggccctgcccacctacaacaatcacctctacaagcaaatctccaacagcacatctggaggatcttcaaatgacaacgcctacttcggctacagcaccccctgggggtattttgacttcaacagattccactgccacttctcaccacgtgactggcagcgactcatcaacaacaactggggattccggcctaagcgactcaacttcaagctcttcaacattcaggtcaaagaggttacggacaacaatggagtcaagaccatcgccaataaccttaccagcacggtccaggtcttcacggactcagactatcagctcccgtacgtgctcgggtcggctcacgagggctgcctcccgccgttcccagcggacgttttcatgattcctcagtacgggtatctgacgcttaatgatggaagccaggccgtgggtcgttcgtccttttactgcctggaatatttcccgtcgcaaatgctaagaacgggtaacaacttccagttcagctacgagtttgagaacgtacctttccatagcagctacgctcacagccaaagcctggaccgactaatgaatccactcatcgatcagtatctgtattacttgagtaagtatattgtgggttctggttctccgcattctaaggcgcagaatcagcagacgttgaagttttcggtagctggtcctagcaacatggctgtccagggaagaaactacatacctggacccagctaccgacaacaacgtgtctcaaccactgtgactcaaaacaacaacagcgaatttgcttggcctggagcttcttcttgggctctcaatggacgtaatagcttgatgaatcctggacctgctatggccagccacaaagaaggagaggaccgtttctttcctttgtctggatctttaatttttggcaaacaaggaactggaagagacaacgtggatgcggacaaagtcatgataaccaacgaagaagaaattaaaactactaacccggtagcaacggagtcctatggacaagtggccacaaaccaccagagtgcccaagcacaggcgcagaccggctgggttcaaaaccaaggaatacttccgggtatggtttggcaggacagagatgtgtacctgcaaggacccatttgggccaaaattcctcacacggacggcaactttcacccttctccgctgatgggagggtttggaatgaagcacccgcctcctcagatcctcatcaaaaacacacctgtacctgcggatcctccaacggccttcaacaaggacaagctgaactctttcatcacccagtattctactggccaagtcagcgtggagatcgagtgggagctgcagaaggaaaacagcaagcgctggaacccggagatccagtacacttccaactattacaagtctaataatgttgaatttgctgttaatactgaaggtgtatatagtgaaccccgccccattggcacgcggtatttaacgaggaactta

SEQ ID NO: 25 - DNA, 2226 bp, synthetic construct
  source 1..2226: mol_type = other DNA
atggctgccgatggttatcttccagattggctcgaggacaaccttagtgaaggaattcgcgagtggtgggctttgaaacctggagcccctcaacccaaggcaaatcaacaacatcaagacaacgctcgaggtcttgtgcttccgggttacaaataccttggacccggcaacggactcgacaagggggagccggtcaacgcagcagacgcggcggccctcgagcacgacaaggcctacgaccagcagctcaaggccggagacaacccgtacctcaagtacaaccacgccgacgccgagttccaggagcggctcaaagaagatacgtcttttgggggcaacctcgggcgagcagtcttccaggccaaaaagaggcttcttgaacctcttggtctggttgaggaagcggctaagacggctcctggaaagaagaggcctgtagagcagtctcctcaggaaccggactcctccgcgggtattggcaaatcgggtgcacagcccgctaaaaagagactcaatttcggtcagactggcgacacagagtcagtcccagaccctcaaccaatcggagaacctcccgcagccccctcaggtgtgggatctcttacaatggcttcaggtggtggcgcaccagtggcagacaataacgaaggtgccgatggagtgggtagttcctcgggaaattggcattgcgattcccaatggctgggggacagagtcatcaccaccagcacccgaacctgggccctgcccacctacaacaatcacctctacaagcaaatctccaacagcacatctggaggatcttcaaatgacaacgcctacttcggctacagcaccccctgggggtattttgacttcaacagattccactgccacttctcaccacgtgactggcagcgactcatcaacaacaactggggattccggcctaagcgactcaacttcaagctcttcaacattcaggtcaaagaggttacggacaacaatggagtcaagaccatcgccaataaccttaccagcacggtccaggtcttcacggactcagactatcagctcccgtacgtgctcgggtcggctcacgagggctgcctcccgccgttcccagcggacgttttcatgattcctcagtacgggtatctgacgcttaatgatggaagccaggccgtgggtcgttcgtccttttactgcctggaatatttcccgtcgcaaatgctaagaacgggtaacaacttccagttcagctacgagtttgagaacgtacctttccatagcagctacgctcacagccaaagcctggaccgactaatgaatccactcatcgatcagtatctgtattacttgagtaagacgatttctaagcgtggttctccgcattctaaggcgcagaatcagcagacgttgaagttttcggtagctggtcctagcaacatggctgtccagggaagaaactacatacctggacccagctaccgacaacaacgtgtctcaaccactgtgactcaaaacaacaacagcgaatttgcttggcctggagcttcttcttgggctctcaatggacgtaatagcttgatgaatcctggacctgctatggccagccacaaagaaggagaggaccgtttctttcctttgtctggatctttaatttttggcaaacaaggaactggaagagacaacgtggatgcggacaaagtcatgataaccaacgaagaagaaattaaaactactaacccggtagcaacggagtcctatggacaagtggccacaaaccaccagagtgcccaagcacaggcgcagaccggctgggttcaaaaccaaggaatacttccgggtatggtttggcaggacagagatgtgtacctgcaaggacccatttgggccaaaattcctcacacggacggcaactttcacccttctccgctgatgggagggtttggaatgaagcacccgcctcctcagatcctcatcaaaaacacacctgtacctgcggatcctccaacggccttcaacaaggacaagctgaactctttcatcacccagtattctactggccaagtcagcgtggagatcgagtgggagctgcagaaggaaaacagcaagcgctggaacccggagatccagtacacttccaactattacaagtctaataatgttgaatttgctgttaatactgaaggtgtatatagtgaaccccgccccattggcacgcggtatttaacgaggaactta

SEQ ID NO: 26 - DNA, 2226 bp, synthetic construct
  source 1..2226: mol_type = other DNA
atggctgccgatggttatcttccagattggctcgaggacaaccttagtgaaggaattcgcgagtggtgggctttgaaacctggagcccctcaacccaaggcaaatcaacaacatcaagacaacgctcgaggtcttgtgcttccgggttacaaataccttggacccggcaacggactcgacaagggggagccggtcaacgcagcagacgcggcggccctcgagcacgacaaggcctacgaccagcagctcaaggccggagacaacccgtacctcaagtacaaccacgccgacgccgagttccaggagcggctcaaagaagatacgtcttttgggggcaacctcgggcgagcagtcttccaggccaaaaagaggcttcttgaacctcttggtctggttgaggaagcggctaagacggctcctggaaagaagaggcctgtagagcagtctcctcaggaaccggactcctccgcgggtattggcaaatcgggtgcacagcccgctaaaaagagactcaatttcggtcagactggcgacacagagtcagtcccagaccctcaaccaatcggagaacctcccgcagccccctcaggtgtgggatctcttacaatggcttcaggtggtggcgcaccagtggcagacaataacgaaggtgccgatggagtgggtagttcctcgggaaattggcattgcgattcccaatggctgggggacagagtcatcaccaccagcacccgaacctgggccctgcccacctacaacaatcacctctacaagcaaatctccaacagcacatctggaggatcttcaaatgacaacgcctacttcggctacagcaccccctgggggtattttgacttcaacagattccactgccacttctcaccacgtgactggcagcgactcatcaacaacaactggggattccggcctaagcgactcaacttcaagctcttcaacattcaggtcaaagaggttacggacaacaatggagtcaagaccatcgccaataaccttaccagcacggtccaggtcttcacggactcagactatcagctcccgtacgtgctcgggtcggctcacgagggctgcctcccgccgttcccagcggacgttttcatgattcctcagtacgggtatctgacgcttaatgatggaagccaggccgtgggtcgttcgtccttttactgcctggaatatttcccgtcgcaaatgctaagaacgggtaacaacttccagttcagctacgagtttgagaacgtacctttccatagcagctacgctcacagccaaagcctggaccgactaatgaatccactcatcgatcagtatctgtattacttgagtaagggtctgggtggttctggttctccgcattctaaggcgcagaatcagcagacgttgaagttttcggtagctggtcctagcaacatggctgtccagggaagaaactacatacctggacccagctaccgacaacaacgtgtctcaaccactgtgactcaaaacaacaacagcgaatttgcttggcctggagcttcttcttgggctctcaatggacgtaatagcttgatgaatcctggacctgctatggccagccacaaagaaggagaggaccgtttctttcctttgtctggatctttaatttttggcaaacaaggaactggaagagacaacgtggatgcggacaaagtcatgataaccaacgaagaagaaattaaaactactaacccggtagcaacggagtcctatggacaagtggccacaaaccaccagagtgcccaagcacaggcgcagaccggctgggttcaaaaccaaggaatacttccgggtatggtttggcaggacagagatgtgtacctgcaaggacccatttgggccaaaattcctcacacggacggcaactttcacccttctccgctgatgggagggtttggaatgaagcacccgcctcctcagatcctcatcaaaaacacacctgtacctgcggatcctccaacggccttcaacaaggacaagctgaactctttcatcacccagtattctactggccaagtcagcgtggagatcgagtgggagctgcagaaggaaaacagcaagcgctggaacccggagatccagtacacttccaactattacaagtctaataatgttgaatttgctgttaatactgaaggtgtatatagtgaaccccgccccattggcacgcggtatttaacgaggaactta

SEQ ID NO: 27 - DNA, 2226 bp, synthetic construct
  source 1..2226: mol_type = other DNA
atggctgccgatggttatcttccagattggctcgaggacaaccttagtgaaggaattcgcgagtggtgggctttgaaacctggagcccctcaacccaaggcaaatcaacaacatcaagacaacgctcgaggtcttgtgcttccgggttacaaataccttggacccggcaacggactcgacaagggggagccggtcaacgcagcagacgcggcggccctcgagcacgacaaggcctacgaccagcagctcaaggccggagacaacccgtacctcaagtacaaccacgccgacgccgagttccaggagcggctcaaagaagatacgtcttttgggggcaacctcgggcgagcagtcttccaggccaaaaagaggcttcttgaacctcttggtctggttgaggaagcggctaagacggctcctggaaagaagaggcctgtagagcagtctcctcaggaaccggactcctccgcgggtattggcaaatcgggtgcacagcccgctaaaaagagactcaatttcggtcagactggcgacacagagtcagtcccagaccctcaaccaatcggagaacctcccgcagccccctcaggtgtgggatctcttacaatggcttcaggtggtggcgcaccagtggcagacaataacgaaggtgccgatggagtgggtagttcctcgggaaattggcattgcgattcccaatggctgggggacagagtcatcaccaccagcacccgaacctgggccctgcccacctacaacaatcacctctacaagcaaatctccaacagcacatctggaggatcttcaaatgacaacgcctacttcggctacagcaccccctgggggtattttgacttcaacagattccactgccacttctcaccacgtgactggcagcgactcatcaacaacaactggggattccggcctaagcgactcaacttcaagctcttcaacattcaggtcaaagaggttacggacaacaatggagtcaagaccatcgccaataaccttaccagcacggtccaggtcttcacggactcagactatcagctcccgtacgtgctcgggtcggctcacgagggctgcctcccgccgttcccagcggacgttttcatgattcctcagtacgggtatctgacgcttaatgatggaagccaggccgtgggtcgttcgtccttttactgcctggaatatttcccgtcgcaaatgctaagaacgggtaacaacttccagttcagctacgagtttgagaacgtacctttccatagcagctacgctcacagccaaagcctggaccgactaatgaatccactcatcgatcagtatctgtattacttgagtaagacgattaatggtcatgattctccgcattctaaggcgcagaatctgcagacgttgaagttttcggtagctggtcctagcaacatggctgtccagggaagaaactacatacctggacccagctaccgacaacaacgtgtctcaaccactgtgactcaaaacaacaacagcgaatttgcttggcctggagcttcttcttgggctctcaatggacgtaatagcttgatgaatcctggacctgctatggccagccacaaagaaggagaggaccgtttctttcctttgtctggatctttaatttttggcaaacaaggaactggaagagacaacgtggatgcggacaaagtcatgataaccaacgaagaagaaattaaaactactaacccggtagcaacggagtcctatggacaagtggccacaaaccaccagagtgcccaagcacaggcgcagaccggctgggttcaaaaccaaggaatacttccgggtatggtttggcaggacagagatgtgtacctgcaaggacccatttgggccaaaattcctcacacggacggcaactttcacccttctccgctgatgggagggtttggaatgaagcacccgcctcctcagatcctcatcaaaaacacacctgtacctgcggatcctccaacggccttcaacaaggacaagctgaactctttcatcacccagtattctactggccaagtcagcgtggagatcgagtgggagctgcagaaggaaaacagcaagcgctggaacccggagatccagtacacttccaactattacaagtctaataatgttgaatttgctgttaatactgaaggtgtatatagtgaaccccgccccattggcacgcggtatttaacgaggaactta

SEQ ID NO: 28 - DNA, 2226 bp, synthetic construct
  source 1..2226: mol_type = other DNA
atggctgccgatggttatcttccagattggctcgaggacaaccttagtgaaggaattcgcgagtggtgggctttgaaacctggagcccctcaacccaaggcaaatcaacaacatcaagacaacgctcgaggtcttgtgcttccgggttacaaataccttggacccggcaacggactcgacaagggggagccggtcaacgcagcagacgcggcggccctcgagcacgacaaggcctacgaccagcagctcaaggccggagacaacccgtacctcaagtacaaccacgccgacgccgagttccaggagcggctcaaagaagatacgtcttttgggggcaacctcgggcgagcagtcttccaggccaaaaagaggcttcttgaacctcttggtctggttgaggaagcggctaagacggctcctggaaagaagaggcctgtagagcagtctcctcaggaaccggactcctccgcgggtattggcaaatcgggtgcacagcccgctaaaaagagactcaatttcggtcagactggcgacacagagtcagtcccagaccctcaaccaatcggagaacctcccgcagccccctcaggtgtgggatctcttacaatggcttcaggtggtggcgcaccagtggcagacaataacgaaggtgccgatggagtgggtagttcctcgggaaattggcattgcgattcccaatggctgggggacagagtcatcaccaccagcacccgaacctgggccctgcccacctacaacaatcacctctacaagcaaatctccaacagcacatctggaggatcttcaaatgacaacgcctacttcggctacagcaccccctgggggtattttgacttcaacagattccactgccacttctcaccacgtgactggcagcgactcatcaacaacaactggggattccggcctaagcgactcaacttcaagctcttcaacattcaggtcaaagaggttacggacaacaatggagtcaagaccatcgccaataaccttaccagcacggtccaggtcttcacggactcagactatcagctcccgtacgtgctcgggtcggctcacgagggctgcctcccgccgttcccagcggacgttttcatgattcctcagtacgggtatctgacgcttaatgatggaagccaggccgtgggtcgttcgtccttttactgcctggaatatttcccgtcgcaaatgctaagaacgggtaacaacttccagttcagctacgagtttgagaacgtacctttccatagcagctacgctcacagccaaagcctggaccgactaatgaatccactcatcgatcagtatctgtattacttgagtaagacggtgaatggtcatgattctccgcattctaaggcgcagaatcagcagacgttgaagttttcggtagctggtcctagcaacatggctgtccagggaagaaactacatacctggacccagctaccgacaacaacgtgtctcaaccactgtgactcaaaacaacaacagcgaatttgcttggcctggagcttcttcttgggctctcaatggacgtaatagcttgatgaatcctggacctgctatggccagccacaaagaaggagaggaccgtttctttcctttgtctggatctttaatttttggcaaacaaggaactggaagagacaacgtggatgcggacaaagtcatgataaccaacgaagaagaaattaaaactactaacccggtagcaacggagtcctatggacaagtggccacaaaccaccagagtgcccaagcacaggcgcagaccggctgggttcaaaaccaaggaatacttccgggtatggtttggcaggacagagatgtgtacctgcaaggacccatttgggccaaaattcctcacacggacggcaactttcacccttctccgctgatgggagggtttggaatgaagcacccgcctcctcagatcctcatcaaaaacacacctgtacctgcggatcctccaacggccttcaacaaggacaagctgaactctttcatcacccagtattctactggccaagtcagcgtggagatcgagtgggagctgcagaaggaaaacagcaagcgctggaacccggagatccagtacacttccaactattacaagtctaataatgttgaatttgctgttaatactgaaggtgtatatagtgaaccccgccccattggcacgcggtatttaacgaggaactta

SEQ ID NO: 29 - DNA, 2226 bp, synthetic construct
  source 1..2226: mol_type = other DNA
atggctgccgatggttatcttccagattggctcgaggacaaccttagtgaaggaattcgcgagtggtgggctttgaaacctggagcccctcaacccaaggcaaatcaacaacatcaagacaacgctcgaggtcttgtgcttccgggttacaaataccttggacccggcaacggactcgacaagggggagccggtcaacgcagcagacgcggcggccctcgagcacgacaaggcctacgaccagcagctcaaggccggagacaacccgtacctcaagtacaaccacgccgacgccgagttccaggagcggctcaaagaagatacgtcttttgggggcaacctcgggcgagcagtcttccaggccaaaaagaggcttcttgaacctcttggtctggttgaggaagcggctaagacggctcctggaaagaagaggcctgtagagcagtctcctcaggaaccggactcctccgcgggtattggcaaatcgggtgcacagcccgctaaaaagagactcaatttcggtcagactggcgacacagagtcagtcccagaccctcaaccaatcggagaacctcccgcagccccctcaggtgtgggatctcttacaatggcttcaggtggtggcgcaccagtggcagacaataacgaaggtgccgatggagtgggtagttcctcgggaaattggcattgcgattcccaatggctgggggacagagtcatcaccaccagcacccgaacctgggccctgcccacctacaacaatcacctctacaagcaaatctccaacagcacatctggaggatcttcaaatgacaacgcctacttcggctacagcaccccctgggggtattttgacttcaacagattccactgccacttctcaccacgtgactggcagcgactcatcaacaacaactggggattccggcctaagcgactcaacttcaagctcttcaacattcaggtcaaagaggttacggacaacaatggagtcaagaccatcgccaataaccttaccagcacggtccaggtcttcacggactcagactatcagctcccgtacgtgctcgggtcggctcacgagggctgcctcccgccgttcccagcggacgttttcatgattcctcagtacgggtatctgacgcttaatgatggaagccaggccgtgggtcgttcgtccttttactgcctggaatatttcccgtcgcaaatgctaagaacgggtaacaacttccagttcagctacgagtttgagaacgtacctttccatagcagctacgctcacagccaaagcctggaccgactaatgaatccactcatcgatcagtatctgtattacttgagtaagacgattaatggtcatgattctccgcattctaaggcgctgaatcagcagacgttgaagttttcggtagctggtcctagcaacatggctgtccagggaagaaactacatacctggacccagctaccgacaacaacgtgtctcaaccactgtgactcaaaacaacaacagcgaatttgcttggcctggagcttcttcttgggctctcaatggacgtaatagcttgatgaatcctggacctgctatggccagccacaaagaaggagaggaccgtttctttcctttgtctggatctttaatttttggcaaacaaggaactggaagagacaacgtggatgcggacaaagtcatgataaccaacgaagaagaaattaaaactactaacccggtagcaacggagtcctatggacaagtggccacaaaccaccagagtgcccaagcacaggcgcagaccggctgggttcaaaaccaaggaatacttccgggtatggtttggcaggacagagatgtgtacctgcaaggacccatttgggccaaaattcctcacacggacggcaactttcacccttctccgctgatgggagggtttggaatgaagcacccgcctcctcagatcctcatcaaaaacacacctgtacctgcggatcctccaacggccttcaacaaggacaagctgaactctttcatcacccagtattctactggccaagtcagcgtggagatcgagtgggagctgcagaaggaaaacagcaagcgctggaacccggagatccagtacacttccaactattacaagtctaataatgttgaatttgctgttaatactgaaggtgtatatagtgaaccccgccccattggcacgcggtatttaacgaggaactta

SEQ ID NO: 30 - DNA, 2226 bp, synthetic construct
  source 1..2226: mol_type = other DNA
atggctgccgatggttatcttccagattggctcgaggacaaccttagtgaaggaattcgcgagtggtgggctttgaaacctggagcccctcaacccaaggcaaatcaacaacatcaagacaacgctcgaggtcttgtgcttccgggttacaaataccttggacccggcaacggactcgacaagggggagccggtcaacgcagcagacgcggcggccctcgagcacgacaaggcctacgaccagcagctcaaggccggagacaacccgtacctcaagtacaaccacgccgacgccgagttccaggagcggctcaaagaagatacgtcttttgggggcaacctcgggcgagcagtcttccaggccaaaaagaggcttcttgaacctcttggtctggttgaggaagcggctaagacggctcctggaaagaagaggcctgtagagcagtctcctcaggaaccggactcctccgcgggtattggcaaatcgggtgcacagcccgctaaaaagagactcaatttcggtcagactggcgacacagagtcagtcccagaccctcaaccaatcggagaacctcccgcagccccctcaggtgtgggatctcttacaatggcttcaggtggtggcgcaccagtggcagacaataacgaaggtgccgatggagtgggtagttcctcgggaaattggcattgcgattcccaatggctgggggacagagtcatcaccaccagcacccgaacctgggccctgcccacctacaacaatcacctctacaagcaaatctccaacagcacatctggaggatcttcaaatgacaacgcctacttcggctacagcaccccctgggggtattttgacttcaacagattccactgccacttctcaccacgtgactggcagcgactcatcaacaacaactggggattccggcctaagcgactcaacttcaagctcttcaacattcaggtcaaagaggttacggacaacaatggagtcaagaccatcgccaataaccttaccagcacggtccaggtcttcacggactcagactatcagctcccgtacgtgctcgggtcggctcacgagggctgcctcccgccgttcccagcggacgttttcatgattcctcagtacgggtatctgacgcttaatgatggaagccaggccgtgggtcgttcgtccttttactgcctggaatatttcccgtcgcaaatgctaagaacgggtaacaacttccagttcagctacgagtttgagaacgtacctttccatagcagctacgctcacagccaaagcctggaccgactaatgaatccactcatcgatcagtatctgtattacttgagtaagacgattaatggtcatgattctccgcattctaaggcgcagaatcagcagtctttgaagttttcggtagctggtcctagcaacatggctgtccagggaagaaactacatacctggacccagctaccgacaacaacgtgtctcaaccactgtgactcaaaacaacaacagcgaatttgcttggcctggagcttcttcttgggctctcaatggacgtaatagcttgatgaatcctggacctgctatggccagccacaaagaaggagaggaccgtttctttcctttgtctggatctttaatttttggcaaacaaggaactggaagagacaacgtggatgcggacaaagtcatgataaccaacgaagaagaaattaaaactactaacccggtagcaacggagtcctatggacaagtggccacaaaccaccagagtgcccaagcacaggcgcagaccggctgggttcaaaaccaaggaatacttccgggtatggtttggcaggacagagatgtgtacctgcaaggacccatttgggccaaaattcctcacacggacggcaactttcacccttctccgctgatgggagggtttggaatgaagcacccgcctcctcagatcctcatcaaaaacacacctgtacctgcggatcctccaacggccttcaacaaggacaagctgaactctttcatcacccagtattctactggccaagtcagcgtggagatcgagtgggagctgcagaaggaaaacagcaagcgctggaacccggagatccagtacacttccaactattacaagtctaataatgttgaatttgctgttaatactgaaggtgtatatagtgaaccccgccccattggcacgcggtatttaacgaggaactta

SEQ ID NO: 31 - DNA, 2226 bp, synthetic construct
  source 1..2226: mol_type = other DNA
atggctgccgatggttatcttccagattggctcgaggacaaccttagtgaaggaattcgcgagtggtgggctttgaaacctggagcccctcaacccaaggcaaatcaacaacatcaagacaacgctcgaggtcttgtgcttccgggttacaaataccttggacccggcaacggactcgacaagggggagccggtcaacgcagcagacgcggcggccctcgagcacgacaaggcctacgaccagcagctcaaggccggagacaacccgtacctcaagtacaaccacgccgacgccgagttccaggagcggctcaaagaagatacgtcttttgggggcaacctcgggcgagcagtcttccaggccaaaaagaggcttcttgaacctcttggtctggttgaggaagcggctaagacggctcctggaaagaagaggcctgtagagcagtctcctcaggaaccggactcctccgcgggtattggcaaatcgggtgcacagcccgctaaaaagagactcaatttcggtcagactggcgacacagagtcagtcccagaccctcaaccaatcggagaacctcccgcagccccctcaggtgtgggatctcttacaatggcttcaggtggtggcgcaccagtggcagacaataacgaaggtgccgatggagtgggtagttcctcgggaaattggcattgcgattcccaatggctgggggacagagtcatcaccaccagcacccgaacctgggccctgcccacctacaacaatcacctctacaagcaaatctccaacagcacatctggaggatcttcaaatgacaacgcctacttcggctacagcaccccctgggggtattttgacttcaacagattccactgccacttctcaccacgtgactggcagcgactcatcaacaacaactggggattccggcctaagcgactcaacttcaagctcttcaacattcaggtcaaagaggttacggacaacaatggagtcaagaccatcgccaataaccttaccagcacggtccaggtcttcacggactcagactatcagctcccgtacgtgctcgggtcggctcacgagggctgcctcccgccgttcccagcggacgttttcatgattcctcagtacgggtatctgacgcttaatgatggaagccaggccgtgggtcgttcgtccttttactgcctggaatatttcccgtcgcaaatgctaagaacgggtaacaacttccagttcagctacgagtttgagaacgtacctttccatagcagctacgctcacagccaaagcctggaccgactaatgaatccactcatcgatcagtatctgtattacttgagtaagacgattaatggtcatgattctccgcattctaaggcgcagaatcagcagattttgaagttttcggtagctggtcctagcaacatggctgtccagggaagaaactacatacctggacccagctaccgacaacaacgtgtctcaaccactgtgactcaaaacaacaacagcgaatttgcttggcctggagcttcttcttgggctctcaatggacgtaatagcttgatgaatcctggacctgctatggccagccacaaagaaggagaggaccgtttctttcctttgtctggatctttaatttttggcaaacaaggaactggaagagacaacgtggatgcggacaaagtcatgataaccaacgaagaagaaattaaaactactaacccggtagcaacggagtcctatggacaagtggccacaaaccaccagagtgcccaagcacaggcgcagaccggctgggttcaaaaccaaggaatacttccgggtatggtttggcaggacagagatgtgtacctgcaaggacccatttgggccaaaattcctcacacggacggcaactttcacccttctccgctgatgggagggtttggaatgaagcacccgcctcctcagatcctcatcaaaaacacacctgtacctgcggatcctccaacggccttcaacaaggacaagctgaactctttcatcacccagtattctactggccaagtcagcgtggagatcgagtgggagctgcagaaggaaaacagcaagcgctggaacccggagatccagtacacttccaactattacaagtctaataatgttgaatttgctgttaatactgaaggtgtatatagtgaaccccgccccattggcacgcggtatttaacgaggaactta

SEQ ID NO: 32 - DNA, 2226 bp, synthetic construct
  source 1..2226: mol_type = other DNA
atggctgccgatggttatcttccagattggctcgaggacaaccttagtgaaggaattcgcgagtggtgggctttgaaacctggagcccctcaacccaaggcaaatcaacaacatcaagacaacgctcgaggtcttgtgcttccgggttacaaataccttggacccggcaacggactcgacaagggggagccggtcaacgcagcagacgcggcggccctcgagcacgacaaggcctacgaccagcagctcaaggccggagacaacccgtacctcaagtacaaccacgccgacgccgagttccaggagcggctcaaagaagatacgtcttttgggggcaacctcgggcgagcagtcttccaggccaaaaagaggcttcttgaacctcttggtctggttgaggaagcggctaagacggctcctggaaagaagaggcctgtagagcagtctcctcaggaaccggactcctccgcgggtattggcaaatcgggtgcacagcccgctaaaaagagactcaatttcggtcagactggcgacacagagtcagtcccagaccctcaaccaatcggagaacctcccgcagccccctcaggtgtgggatctcttacaatggcttcaggtggtggcgcaccagtggcagacaataacgaaggtgccgatggagtgggtagttcctcgggaaattggcattgcgattcccaatggctgggggacagagtcatcaccaccagcacccgaacctgggccctgcccacctacaacaatcacctctacaagcaaatctccaacagcacatctggaggatcttcaaatgacaacgcctacttcggctacagcaccccctgggggtattttgacttcaacagattccactgccacttctcaccacgtgactggcagcgactcatcaacaacaactggggattccggcctaagcgactcaacttcaagctcttcaacattcaggtcaaagaggttacggacaacaatggagtcaagaccatcgccaataaccttaccagcacggtccaggtcttcacggactcagactatcagctcccgtacgtgctcgggtcggctcacgagggctgcctcccgccgttcccagcggacgttttcatgattcctcagtacgggtatctgacgcttaatgatggaagccaggccgtgggtcgttcgtccttttactgcctggaatatttcccgtcgcaaatgctaagaacgggtaacaacttccagttcagctacgagtttgagaacgtacctttccatagcagctacgctcacagccaaagcctggaccgactaatgaatccactcatcgatcagtatctgtattacttgagtaagacgattaatggttctggttctccgcattttacgcgtcagaatcagcagacgttgaagttttcggtagctggtcctagcaacatggctgtccagggaagaaactacatacctggacccagctaccgacaacaacgtgtctcaaccactgtgactcaaaacaacaacagcgaatttgcttggcctggagcttcttcttgggctctcaatggacgtaatagcttgatgaatcctggacctgctatggccagccacaaagaaggagaggaccgtttctttcctttgtctggatctttaatttttggcaaacaaggaactggaagagacaacgtggatgcggacaaagtcatgataaccaacgaagaagaaattaaaactactaacccggtagcaacggagtcctatggacaagtggccacaaaccaccagagtgcccaagcacaggcgcagaccggctgggttcaaaaccaaggaatacttccgggtatggtttggcaggacagagatgtgtacctgcaaggacccatttgggccaaaattcctcacacggacggcaactttcacccttctccgctgatgggagggtttggaatgaagcacccgcctcctcagatcctcatcaaaaacacacctgtacctgcggatcctccaacggccttcaacaaggacaagctgaactctttcatcacccagtattctactggccaagtcagcgtggagatcgagtgggagctgcagaaggaaaacagcaagcgctggaacccggagatccagtacacttccaactattacaagtctaataatgttgaatttgctgttaatactgaaggtgtatatagtgaaccccgccccattggcacgcggtatttaacgaggaactta

SEQ ID NO: 33 - DNA, 2226 bp, synthetic construct
  source 1..2226: mol_type = other DNA
atggctgccgatggttatcttccagattggctcgaggacaaccttagtgaaggaattcgcgagtggtgggctttgaaacctggagcccctcaacccaaggcaaatcaacaacatcaagacaacgctcgaggtcttgtgcttccgggttacaaataccttggacccggcaacggactcgacaagggggagccggtcaacgcagcagacgcggcggccctcgagcacgacaaggcctacgaccagcagctcaaggccggagacaacccgtacctcaagtacaaccacgccgacgccgagttccaggagcggctcaaagaagatacgtcttttgggggcaacctcgggcgagcagtcttccaggccaaaaagaggcttcttgaacctcttggtctggttgaggaagcggctaagacggctcctggaaagaagaggcctgtagagcagtctcctcaggaaccggactcctccgcgggtattggcaaatcgggtgcacagcccgctaaaaagagactcaatttcggtcagactggcgacacagagtcagtcccagaccctcaaccaatcggagaacctcccgcagccccctcaggtgtgggatctcttacaatggcttcaggtggtggcgcaccagtggcagacaataacgaaggtgccgatggagtgggtagttcctcgggaaattggcattgcgattcccaatggctgggggacagagtcatcaccaccagcacccgaacctgggccctgcccacctacaacaatcacctctacaagcaaatctccaacagcacatctggaggatcttcaaatgacaacgcctacttcggctacagcaccccctgggggtattttgacttcaacagattccactgccacttctcaccacgtgactggcagcgactcatcaacaacaactggggattccggcctaagcgactcaacttcaagctcttcaacattcaggtcaaagaggttacggacaacaatggagtcaagaccatcgccaataaccttaccagcacggtccaggtcttcacggactcagactatcagctcccgtacgtgctcgggtcggctcacgagggctgcctcccgccgttcccagcggacgttttcatgattcctcagtacgggtatctgacgcttaatgatggaagccaggccgtgggtcgttcgtccttttactgcctggaatatttcccgtcgcaaatgctaagaacgggtaacaacttccagttcagctacgagtttgagaacgtacctttccatagcagctacgctcacagccaaagcctggaccgactaatgaatccactcatcgatcagtatctgtattacttgagtaagacgtctaatggtcatgattctccgcattctaaggcgcagaatcagcagacgttgaagttttcggtagctggtcctagcaacatggctgtccagggaagaaactacatacctggacccagctaccgacaacaacgtgtctcaaccactgtgactcaaaacaacaacagcgaatttgcttggcctggagcttcttcttgggctctcaatggacgtaatagcttgatgaatcctggacctgctatggccagccacaaagaaggagaggaccgtttctttcctttgtctggatctttaatttttggcaaacaaggaactggaagagacaacgtggatgcggacaaagtcatgataaccaacgaagaagaaattaaaactactaacccggtagcaacggagtcctatggacaagtggccacaaaccaccagagtgcccaagcacaggcgcagaccggctgggttcaaaaccaaggaatacttccgggtatggtttggcaggacagagatgtgtacctgcaaggacccatttgggccaaaattcctcacacggacggcaactttcacccttctccgctgatgggagggtttggaatgaagcacccgcctcctcagatcctcatcaaaaacacacctgtacctgcggatcctccaacggccttcaacaaggacaagctgaactctttcatcacccagtattctactggccaagtcagcgtggagatcgagtgggagctgcagaaggaaaacagcaagcgctggaacccggagatccagtacacttccaactattacaagtctaataatgttgaatttgctgttaatactgaaggtgtatatagtgaaccccgccccattggcacgcggtatttaacgaggaactta

SEQ ID NO: 34 - DNA, 2226 bp, synthetic construct
  source 1..2226: mol_type = other DNA
atggctgccgatggttatcttccagattggctcgaggacaaccttagtgaaggaattcgcgagtggtgggctttgaaacctggagcccctcaacccaaggcaaatcaacaacatcaagacaacgctcgaggtcttgtgcttccgggttacaaataccttggacccggcaacggactcgacaagggggagccggtcaacgcagcagacgcggcggccctcgagcacgacaaggcctacgaccagcagctcaaggccggagacaacccgtacctcaagtacaaccacgccgacgccgagttccaggagcggctcaaagaagatacgtcttttgggggcaacctcgggcgagcagtcttccaggccaaaaagaggcttcttgaacctcttggtctggttgaggaagcggctaagacggctcctggaaagaagaggcctgtagagcagtctcctcaggaaccggactcctccgcgggtattggcaaatcgggtgcacagcccgctaaaaagagactcaatttcggtcagactggcgacacagagtcagtcccagaccctcaaccaatcggagaacctcccgcagccccctcaggtgtgggatctcttacaatggcttcaggtggtggcgcaccagtggcagacaataacgaaggtgccgatggagtgggtagttcctcgggaaattggcattgcgattcccaatggctgggggacagagtcatcaccaccagcacccgaacctgggccctgcccacctacaacaatcacctctacaagcaaatctccaacagcacatctggaggatcttcaaatgacaacgcctacttcggctacagcaccccctgggggtattttgacttcaacagattccactgccacttctcaccacgtgactggcagcgactcatcaacaacaactggggattccggcctaagcgactcaacttcaagctcttcaacattcaggtcaaagaggttacggacaacaatggagtcaagaccatcgccaataaccttaccagcacggtccaggtcttcacggactcagactatcagctcccgtacgtgctcgggtcggctcacgagggctgcctcccgccgttcccagcggacgttttcatgattcctcagtacgggtatctgacgcttaatgatggaagccaggccgtgggtcgttcgtccttttactgcctggaatatttcccgtcgcaaatgctaagaacgggtaacaacttccagttcagctacgagtttgagaacgtacctttccatagcagctacgctcacagccaaagcctggaccgactaatgaatccactcatcgatcagtatctgtattacttgagtaagacgattaatggttctggttctccgcattctctgccgtggaatcagcagacgttgaagttttcggtagctggtcctagcaacatggctgtccagggaagaaactacatacctggacccagctaccgacaacaacgtgtctcaaccactgtgactcaaaacaacaacagcgaatttgcttggcctggagcttcttcttgggctctcaatggacgtaatagcttgatgaatcctggacctgctatggccagccacaaagaaggagaggaccgtttctttcctttgtctggatctttaatttttggcaaacaaggaactggaagagacaacgtggatgcggacaaagtcatgataaccaacgaagaagaaattaaaactactaacccggtagcaacggagtcctatggacaagtggccacaaaccaccagagtgcccaagcacaggcgcagaccggctgggttcaaaaccaaggaatacttccgggtatggtttggcaggacagagatgtgtacctgcaaggacccatttgggccaaaattcctcacacggacggcaactttcacccttctccgctgatgggagggtttggaatgaagcacccgcctcctcagatcctcatcaaaaacacacctgtacctgcggatcctccaacggccttcaacaaggacaagctgaactctttcatcacccagtattctactggccaagtcagcgtggagatcgagtgggagctgcagaaggaaaacagcaagcgctggaacccggagatccagtacacttccaactattacaagtctaataatgttgaatttgctgttaatactgaaggtgtatatagtgaaccccgccccattggcacgcggtatttaacgaggaactta

SEQ ID NO: 35 - DNA, 2226 bp, synthetic construct
  source 1..2226: mol_type = other DNA
atggctgccgatggttatcttccagattggctcgaggacaaccttagtgaaggaattcgcgagtggtgggctttgaaacctggagcccctcaacccaaggcaaatcaacaacatcaagacaacgctcgaggtcttgtgcttccgggttacaaataccttggacccggcaacggactcgacaagggggagccggtcaacgcagcagacgcggcggccctcgagcacgacaaggcctacgaccagcagctcaaggccggagacaacccgtacctcaagtacaaccacgccgacgccgagttccaggagcggctcaaagaagatacgtcttttgggggcaacctcgggcgagcagtcttccaggccaaaaagaggcttcttgaacctcttggtctggttgaggaagcggctaagacggctcctggaaagaagaggcctgtagagcagtctcctcaggaaccggactcctccgcgggtattggcaaatcgggtgcacagcccgctaaaaagagactcaatttcggtcagactggcgacacagagtcagtcccagaccctcaaccaatcggagaacctcccgcagccccctcaggtgtgggatctcttacaatggcttcaggtggtggcgcaccagtggcagacaataacgaaggtgccgatggagtgggtagttcctcgggaaattggcattgcgattcccaatggctgggggacagagtcatcaccaccagcacccgaacctgggccctgcccacctacaacaatcacctctacaagcaaatctccaacagcacatctggaggatcttcaaatgacaacgcctacttcggctacagcaccccctgggggtattttgacttcaacagattccactgccacttctcaccacgtgactggcagcgactcatcaacaacaactggggattccggcctaagcgactcaacttcaagctcttcaacattcaggtcaaagaggttacggacaacaatggagtcaagaccatcgccaataaccttaccagcacggtccaggtcttcacggactcagactatcagctcccgtacgtgctcgggtcggctcacgagggctgcctcccgccgttcccagcggacgttttcatgattcctcagtacgggtatctgacgcttaatgatggaagccaggccgtgggtcgttcgtccttttactgcctggaatatttcccgtcgcaaatgctaagaacgggtaacaacttccagttcagctacgagtttgagaacgtacctttccatagcagctacgctcacagccaaagcctggaccgactaatgaatccactcatcgatcagtatctgtattacttgagtaagacgattaatggtcatgattctccgcattctaaggcgcagaatcatcagacgttgaagttttcggtagctggtcctagcaacatggctgtccagggaagaaactacatacctggacccagctaccgacaacaacgtgtctcaaccactgtgactcaaaacaacaacagcgaatttgcttggcctggagcttcttcttgggctctcaatggacgtaatagcttgatgaatcctggacctgctatggccagccacaaagaaggagaggaccgtttctttcctttgtctggatctttaatttttggcaaacaaggaactggaagagacaacgtggatgcggacaaagtcatgataaccaacgaagaagaaattaaaactactaacccggtagcaacggagtcctatggacaagtggccacaaaccaccagagtgcccaagcacaggcgcagaccggctgggttcaaaaccaaggaatacttccgggtatggtttggcaggacagagatgtgtacctgcaaggacccatttgggccaaaattcctcacacggacggcaactttcacccttctccgctgatgggagggtttggaatgaagcacccgcctcctcagatcctcatcaaaaacacacctgtacctgcggatcctccaacggccttcaacaaggacaagctgaactctttcatcacccagtattctactggccaagtcagcgtggagatcgagtgggagctgcagaaggaaaacagcaagcgctggaacccggagatccagtacacttccaactattacaagtctaataatgttgaatttgctgttaatactgaaggtgtatatagtgaaccccgccccattggcacgcggtatttaacgaggaactta

SEQ ID NO: 36 - protein, 742 aa, synthetic construct
MAADGYLPDWLEDNLSEGIREWWALKPGAPQPKANQQHQDNARGLVLPGYKYLGPGNGLDKGEPVNAADAAALEHDKAYDQQLKAGDNPYLKYNHADAEFQERLKEDTSFGGNLGRAVFQAKKRLLEPLGLVEEAAKTAPGKKRPVEQSPQEPDSSAGIGKSGAQPAKKRLNFGQTGDTESVPDPQPIGEPPAAPSGVGSLTMASGGGAPVADNNEGADGVGSSSGNWHCDSQWLGDRVITTSTRTWALPTYNNHLYKQISNSTSGGSSNDNAYFGYSTPWGYFDFNRFHCHFSPRDWQRLINNNWGFRPKRLNFKLFNIQVKEVTDNNGVKTIANNLTSTVQVFTDSDYQLPYVLGSAHEGCLPPFPADVFMIPQYGYLTLNDGSQAVGRSSFYCLEYFPSQMLRTGNNFQFSYEFENVPFHSSYAHSQSLDRLMNPLIDQYLYYLSKTERVSGSPHSKAQNQQTLKFSVAGPSNMAVQGRNYIPGPSYRQQRVSTTVTQNNNSEFAWPGASSWALNGRNSLMNPGPAMASHKEGEDRFFPLSGSLIFGKQGTGRDNVDADKVMITNEEEIKTTNPVATESYGQVATNHQSAQAQAQTGWVQNQGILPGMVWQDRDVYLQGPIWAKIPHTDGNFHPSPLMGGFGMKHPPPQILIKNTPVPADPPTAFNKDKLNSFITQYSTGQVSVEIEWELQKENSKRWNPEIQYTSNYYKSNNVEFAVNTEGVYSEPRPIGTRYLTRNL

SEQ ID NO: 37 - protein, 742 aa, synthetic construct
MAADGYLPDWLEDNLSEGIREWWALKPGAPQPKANQQHQDNARGLVLPGYKYLGPGNGLDKGEPVNAADAAALEHDKAYDQQLKAGDNPYLKYNHADAEFQERLKEDTSFGGNLGRAVFQAKKRLLEPLGLVEEAAKTAPGKKRPVEQSPQEPDSSAGIGKSGAQPAKKRLNFGQTGDTESVPDPQPIGEPPAAPSGVGSLTMASGGGAPVADNNEGADGVGSSSGNWHCDSQWLGDRVITTSTRTWALPTYNNHLYKQISNSTSGGSSNDNAYFGYSTPWGYFDFNRFHCHFSPRDWQRLINNNWGFRPKRLNFKLFNIQVKEVTDNNGVKTIANNLTSTVQVFTDSDYQLPYVLGSAHEGCLPPFPADVFMIPQYGYLTLNDGSQAVGRSSFYCLEYFPSQMLRTGNNFQFSYEFENVPFHSSYAHSQSLDRLMNPLIDQYLYYLSKAEIGHDSPHKSGQNQQTLKFSVAGPSNMAVQGRNYIPGPSYRQQRVSTTVTQNNNSEFAWPGASSWALNGRNSLMNPGPAMASHKEGEDRFFPLSGSLIFGKQGTGRDNVDADKVMITNEEEIKTTNPVATESYGQVATNHQSAQAQAQTGWVQNQGILPGMVWQDRDVYLQGPIWAKIPHTDGNFHPSPLMGGFGMKHPPPQILIKNTPVPADPPTAFNKDKLNSLITQYSTGQVSVEIEWELQKENSKRWNPEIQYTSNYYKSNNVEFAVNTEGVYSEPRPIGTRYLTRNL

SEQ ID NO: 38 - protein, 742 aa, synthetic construct
MAADGYLPDWLEDNLSEGIREWWALKPGAPQPKANQQHQDNARGLVLPGYKYLGPGNGLDKGEPVNAADAAALEHDKAYDQQLKAGDNPYLKYNHADAEFQERLKEDTSFGGNLGRAVFQAKKRLLEPLGLVEEAAKTAPGKKRPVEQSPQEPDSSAGIGKSGAQPAKKRLNFGQTGDTESVPDPQPIGEPPAAPSGVGSLTMASGGGAPVADNNEGADGVGSSSGNWHCDSQWLGDRVITTSTRTWALPTYNNHLYKQISNSTSGGSSNDNAYFGYSTPWGYFDFNRFHCHFSPRDWQRLINNNWGFRPKRLNFKLFNIQVKEVTDNNGVKTIANNLTSTVQVFTDSDYQLPYVLGSAHEGCLPPFPADVFMIPQYGYLTLNDGSQAVGRSSFYCLEYFPSQMLRTGNNFQFSYEFENVPFHSSYAHSQSLDRLMNPLIDQYLYYLSKTIIGSGSPHSKAQNRHTLKFSVAGPSNMAVQGRNYIPGPSYRQQRVSTTVTQNNNSEFAWPGASSWALNGRNSLMNPGPAMASHKEGEDRFFPLSGSLIFGKQGTGRDNVDADKVMITNEEEIKTTNPVATESYGQVATNHQSAQAQAQTGWVQNQGILPGMVWQDRDVYLQGPIWAKIPHTDGNFHPSPLMGGFGMKHPPPQILIKNTPVPADPPTAFNKDKLNSFITQYSTGQVSVEIEWELQKENSKRWNPEIQYTSNYYKSNNVEFAVNTEGVYSEPRPIGTRYLTRNL

SEQ ID NO: 39 - protein, 742 aa, synthetic construct
MAADGYLPDWLEDNLSEGIREWWALKPGAPQPKANQQHQDNARGLVLPGYKYLGPGNGLDKGEPVNAADAAALEHDKAYDQQLKAGDNPYLKYNHADAEFQERLKEDTSFGGNLGRAVFQAKKRLLEPLGLVEEAAKTAPGKKRPVEQSPQEPDSSAGIGKSGAQPAKKRLNFGQTGDTESVPDPQPIGEPPAAPSGVGSLTMASGGGAPVADNNEGADGVGSSSGNWHCDSQWLGDRVITTSTRTWALPTYNNHLYKQISNSTSGGSSNDNAYFGYSTPWGYFDFNRFHCHFSPRDWQRLINNNWGFRPKRLNFKLFNIQVKEVTDNNGVKTIANNLTSTVQVFTDSDYQLPYVLGSAHEGCLPPFPADVFMIPQYGYLTLNDGSQAVGRSSFYCLEYFPSQMLRTGNNFQFSYEFENVPFHSSYAHSQSLDRLMNPLIDQYLYYLSKTEKMSGSPHSKAQNQQTLKFSVAGPSNMAVQGRNYIPGPSYRQQRVSTTVTQNNNSEFAWPGASSWALNGRNSLMNPGPAMASHKEGEDRFFPLSGSLIFGKQGTGRDNVDADKVMITNEEEIKTTNPVATESYGQVATNHQSAQAQAQTGWVQNQGILPGMVWQDRDVYLQGPIWAKIPHTDGNFHPSPLMGGFGMKHPPPQILIKNTPVPADPPTAFNKDKLNSFITQYSTGQVSVEIEWELQKENSKRWNPEIQYTSNYYKSNNVEFAVNTEGVYSEPRPIGTRYLTRNL

SEQ ID NO: 40 - protein, 742 aa, synthetic construct
MAADGYLPDWLEDNLSEGIREWWALKPGAPQPKANQQHQDNARGLVLPGYKYLGPGNGLDKGEPVNAADAAALEHDKAYDQQLKAGDNPYLKYNHADAEFQERLKEDTSFGGNLGRAVFQAKKRLLEPLGLVEEAAKTAPGKKRPVEQSPQEPDSSAGIGKSGAQPAKKRLNFGQTGDTESVPDPQPIGEPPAAPSGVGSLTMASGGGAPVADNNEGADGVGSSSGNWHCDSQWLGDRVITTSTRTWALPTYNNHLYKQISNSTSGGSSNDNAYFGYSTPWGYFDFNRFHCHFSPRDWQRLINNNWGFRPKRLNFKLFNIQVKEVTDNNGVKTIANNLTSTVQVFTDSDYQLPYVLGSAHEGCLPPFPADVFMIPQYGYLTLNDGSQAVGRSSFYCLEYFPSQMLRTGNNFQFSYEFENVPFHSSYAHSQSLDRLMNPLIDQYLYYLSKEINGRGSPHSKAQNQQTLKFSVAGPSNMAVQGRNYIPGPSYRQQRVSTTVTQNNNSEFAWPGASSWALNGRNSLMNPGPAMASHKEGEDRFFPLSGSLIFGKQGTGRDNVDADKVMITNEEEIKTTNPVATESYGQVATNHQSAQAQAQTGWVQNQGILPGMVWQDRDVYLQGPIWAKIPHTDGNFHPSPLMGGFGMKHPPPQILIKNTPVPADPPTAFNKDKLNSFITQYSTGQVSVEIEWELQKENSKRWNPEIQYTSNYYKSNNVEFAVNTEGVYSEPRPIGTRYLTRNL

SEQ ID NO: 41 - protein, 742 aa, synthetic construct
MAADGYLPDWLEDNLSEGIREWWALKPGAPQPKANQQHQDNARGLVLPGYKYLGPGNGLDKGEPVNAADAAALEHDKAYDQQLKAGDNPYLKYNHADAEFQERLKEDTSFGGNLGRAVFQAKKRLLEPLGLVEEAAKTAPGKKRPVEQSPQEPDSSAGIGKSGAQPAKKRLNFGQTGDTESVPDPQPIGEPPAAPSGVGSLTMASGGGAPVADNNEGADGVGSSSGNWHCDSQWLGDRVITTSTRTWALPTYNNHLYKQISNSTSGGSSNDNAYFGYSTPWGYFDFNRFHCHFSPRDWQRLINNNWGFRPKRLNFKLFNIQVKEVTDNNGVKTIANNLTSTVQVFTDSDYQLPYVLGSAHEGCLPPFPADVFMIPQYGYLTLNDGSQAVGRSSFYCLEYFPSQMLRTGNNFQFSYEFENVPFHSSYAHSQSLDRLMNPLIDQYLYYLSKTFNGSGSPHSKAPNLQTLKFSVAGPSNMAVQGRNYIPGPSYRQQRVSTTVTQNNNSEFAWPGASSWALNGRNSLMNPGPAMASHKEGEDRFFPLSGSLIFGKQGTGRDNVDADKVMITNEEEIKTTNPVATESYGQVATNHQSAQAQAQTGWVQNQGILPGMVWQDRDVYLQGPIWAKIPHTDGNFHPSPLMGGFGMKHPPPQILIKNTPVPADPPTAFNKDKLNSFITQYSTGQVSVEIEWELQKENSKRWNPEIQYTSNYYKSNNVEFAVNTEGVYSEPRPIGTRYLTRNL

SEQ ID NO: 42 - protein, 742 aa, synthetic construct
MAADGYLPDWLEDNLSEGIREWWALKPGAPQPKANQQHQDNARGLVLPGYKYLGPGNGLDKGEPVNAADAAALEHDKAYDQQLKAGDNPYLKYNHADAEFQERLKEDTSFGGNLGRAVFQAKKRLLEPLGLVEEAAKTAPGKKRPVEQSPQEPDSSAGIGKSGAQPAKKRLNFGQTGDTESVPDPQPIGEPPAAPSGVGSLTMASGGGAPVADNNEGADGVGSSSGNWHCDSQWLGDRVITTSTRTWALPTYNNHLYKQISNSTSGGSSNDNAYFGYSTPWGYFDFNRFHCHFSPRDWQRLINNNWGFRPKRLNFKLFNIQVKEVTDNNGVKTIANNLTSTVQVFTDSDYQLPYVLGSAHEGCLPPFPADVFMIPQYGYLTLNDGSQAVGRSSFYCLEYFPSQMLRTGNNFQFSYEFENVPFHSSYAHSQSLDRLMNPLIDQYLYYLSKTEKTSGSPHSKAQNQQTLKFSVAGPSNMAVQGRNYIPGPSYRQQRVSTTVTQNNNSEFAWPGASSWALNGRNSLMNPGPAMASHKEGEDRFFPLSGSLIFGKQGTGRDNVDADKVMITNEEEIKTTNPVATESYGQVATNHQSAQAQAQTGWVQNQGILPGMVWQDRDVYLQGPIWAKIPHTDGNFHPSPLMGGFGMKHPPPQILIKNTPVPADPPTAFNKDKLNSFITQYSTGQVSVEIEWELQKENSKRWNPEIQYTSNYYKSNNVEFAVNTEGVYSEPRPIGTRYLTRNL

SEQ ID NO: 43 - protein, 742 aa, synthetic construct
MAADGYLPDWLEDNLSEGIREWWALKPGAPQPKANQQHQDNARGLVLPGYKYLGPGNGLDKGEPVNAADAAALEHDKAYDQQLKAGDNPYLKYNHADAEFQERLKEDTSFGGNLGRAVFQAKKRLLEPLGLVEEAAKTAPGKKRPVEQSPQEPDSSAGIGKSGAQPAKKRLNFGQTGDTESVPDPQPIGEPPAAPSGVGSLTMASGGGAPVADNNEGADGVGSSSGNWHCDSQWLGDRVITTSTRTWALPTYNNHLYKQISNSTSGGSSNDNAYFGYSTPWGYFDFNRFHCHFSPRDWQRLINNNWGFRPKRLNFKLFNIQVKEVTDNNGVKTIANNLTSTVQVFTDSDYQLPYVLGSAHEGCLPPFPADVFMIPQYGYLTLNDGSQAVGRSSFYCLEYFPSQMLRTGNNFQFSYEFENVPFHSSYAHSQSLDRLMNPLIDQYLYYLSKTMNGHDSPHSKAQNQQTLKFSVAGPSNMAVQGRNYIPGPSYRQQRVSTTVTQNNNSEFAWPGASSWALNGRNSLMNPGPAMASHKEGEDRFFPLSGSLIFGKQGTGRDNVDADKVMITNEEEIKTTNPVATESYGQVATNHQSAQAQAQTGWVQNQGILPGMVWQDRDVYLQGPIWAKIPHTDGNFHPSPLMGGFGMKHPPPQILIKNTPVPADPPTAFNKDKLNSFITQYSTGQVSVEIEWELQKENSKRWNPEIQYTSNYYKSNNVEFAVNTEGVYSEPRPIGTRYLTRNL

SEQ ID NO: 44 - protein, 742 aa, synthetic construct
MAADGYLPDWLEDNLSEGIREWWALKPGAPQPKANQQHQDNARGLVLPGYKYLGPGNGLDKGEPVNAADAAALEHDKAYDQQLKAGDNPYLKYNHADAEFQERLKEDTSFGGNLGRAVFQAKKRLLEPLGLVEEAAKTAPGKKRPVEQSPQEPDSSAGIGKSGAQPAKKRLNFGQTGDTESVPDPQPIGEPPAAPSGVGSLTMASGGGAPVADNNEGADGVGSSSGNWHCDSQWLGDRVITTSTRTWALPTYNNHLYKQISNSTSGGSSNDNAYFGYSTPWGYFDFNRFHCHFSPRDWQRLINNNWGFRPKRLNFKLFNIQVKEVTDNNGVKTIANNLTSTVQVFTDSDYQLPYVLGSAHEGCLPPFPADVFMIPQYGYLTLNDGSQAVGRSSFYCLEYFPSQMLRTGNNFQFSYEFENVPFHSSYAHSQSLDRLMNPLIDQYLYYLSKTIDGHDSPHSKAQNQQTLKFSVAGPSNMAVQGRNYIPGPSYRQQRVSTTVTQNNNSEFAWPGASSWALNGRNSLMNPGPAMASHKEGEDRFFPLSGSLIFGKQGTGRDNVDADKVMITNEEEIKTTNPVATESYGQVATNHQSAQAQAQTGWVQNQGILPGMVWQDRDVYLQGPIWAKIPHTDGNFHPSPLMGGFGMKHPPPQILIKNTPVPADPPTAFNKDKLNSFITQYSTGQVSVEIEWELQKENSKRWNPEIQYTSNYYKSNNVEFAVNTEGVYSEPRPIGTRYLTRNL

SEQ ID NO: 45 - protein, 742 aa, synthetic construct
MAADGYLPDWLEDNLSEGIREWWALKPGAPQPKANQQHQDNARGLVLPGYKYLGPGNGLDKGEPVNAADAAALEHDKAYDQQLKAGDNPYLKYNHADAEFQERLKEDTSFGGNLGRAVFQAKKRLLEPLGLVEEAAKTAPGKKRPVEQSPQEPDSSAGIGKSGAQPAKKRLNFGQTGDTESVPDPQPIGEPPAAPSGVGSLTMASGGGAPVADNNEGADGVGSSSGNWHCDSQWLGDRVITTSTRTWALPTYNNHLYKQISNSTSGGSSNDNAYFGYSTPWGYFDFNRFHCHFSPRDWQRLINNNWGFRPKRLNFKLFNIQVKEVTDNNGVKTIANNLTSTVQVFTDSDYQLPYVLGSAHEGCLPPFPADVFMIPQYGYLTLNDGSQAVGRSSFYCLEYFPSQMLRTGNNFQFSYEFENVPFHSSYAHSQSLDRLMNPLIDQYLYYLSKTNNGHDSPHSKAQNQQTLKFSVAGPSNMAVQGRNYIPGPSYRQQRVSTTVTQNNNSEFAWPGASSWALNGRNSLMNPGPAMASHKEGEDRFFPLSGSLIFGKQGTGRDNVDADKVMITNEEEIKTTNPVATESYGQVATNHQSAQAQAQTGWVQNQGILPGMVWQDRDVYLQGPIWAKIPHTDGNFHPSPLMGGFGMKHPPPQILIKNTPVPADPPTAFNKDKLNSFITQYSTGQVSVEIEWELQKENSKRWNPEIQYTSNYYKSNNVEFAVNTEGVYSEPRPIGTRYLTRNL

SEQ ID NO: 46 - protein, 742 aa, synthetic construct
MAADGYLPDWLEDNLSEGIREWWALKPGAPQPKANQQHQDNARGLVLPGYKYLGPGNGLDKGEPVNAADAAALEHDKAYDQQLKAGDNPYLKYNHADAEFQERLKEDTSFGGNLGRAVFQAKKRLLEPLGLVEEAAKTAPGKKRPVEQSPQEPDSSAGIGKSGAQPAKKRLNFGQTGDTESVPDPQPIGEPPAAPSGVGSLTMASGGGAPVADNNEGADGVGSSSGNWHCDSQWLGDRVITTSTRTWALPTYNNHLYKQISNSTSGGSSNDNAYFGYSTPWGYFDFNRFHCHFSPRDWQRLINNNWGFRPKRLNFKLFNIQVKEVTDNNGVKTIANNLTSTVQVFTDSDYQLPYVLGSAHEGCLPPFPADVFMIPQYGYLTLNDGSQAVGRSSFYCLEYFPSQMLRTGNNFQFSYEFENVPFHSSYAHSQSLDRLMNPLIDQYLYYLSKTQRKSGSPHSKAQNQQTLKFSVAGPSNMAVQGRNYIPGPSYRQQRVSTTVTQNNNSEFAWPGASSWALNGRNSLMNPGPAMASHKEGEDRFFPLSGSLIFGKQGTGRDNVDADKVMITNEEEIKTTNPVATESYGQVATNHQSAQAQAQTGWVQNQGILPGMVWQDRDVYLQGPIWAKIPHTDGNFHPSPLMGGFGMKHPPPQILIKNTPVPADPPTAFNKDKLNSFITQYSTGQVSVEIEWELQKENSKRWNPEIQYTSNYYKSNNVEFAVNTEGVYSEPRPIGTRYLTRNL

SEQ ID NO: 47 - protein, 742 aa, synthetic construct
MAADGYLPDWLEDNLSEGIREWWALKPGAPQPKANQQHQDNARGLVLPGYKYLGPGNGLDKGEPVNAADAAALEHDKAYDQQLKAGDNPYLKYNHADAEFQERLKEDTSFGGNLGRAVFQAKKRLLEPLGLVEEAAKTAPGKKRPVEQSPQEPDSSAGIGKSGAQPAKKRLNFGQTGDTESVPDPQPIGEPPAAPSGVGSLTMASGGGAPVADNNEGADGVGSSSGNWHCDSQWLGDRVITTSTRTWALPTYNNHLYKQISNSTSGGSSNDNAYFGYSTPWGYFDFNRFHCHFSPRDWQRLINNNWGFRPKRLNFKLFNIQVKEVTDNNGVKTIANNLTSTVQVFTDSDYQLPYVLGSAHEGCLPPFPADVFMIPQYGYLTLNDGSQAVGRSSFYCLEYFPSQMLRTGNNFQFSYEFENVPFHSSYAHSQSLDRLMNPLIDQYLYYLSKTINGSGSPHSKAQARKTLKFSVAGPSNMAVQGRNYIPGPSYRQQRVSTTVTQNNNSEFAWPGASSWALNGRNSLMNPGPAMASHKEGEDRFFPLSGSLIFGKQGTGRDNVDADKVMITNEEEIKTTNPVATESYGQVATNHQSAQAQAQTGWVQNQGILPGMVWQDRDVYLQGPIWAKIPHTDGNFHPSPLMGGFGMKHPPPQILIKNTPVPADPPTAFNKDKLNSFITQYSTGQVSVEIEWELQKENSKRWNPEIQYTSNYYKSNNVEFAVNTEGVYSEPRPIGTRYLTRNL

SEQ ID NO: 48 - protein, 742 aa, synthetic construct
MAADGYLPDWLEDNLSEGIREWWALKPGAPQPKANQQHQDNARGLVLPGYKYLGPGNGLDKGEPVNAADAAALEHDKAYDQQLKAGDNPYLKYNHADAEFQERLKEDTSFGGNLGRAVFQAKKRLLEPLGLVEEAAKTAPGKKRPVEQSPQEPDSSAGIGKSGAQPAKKRLNFGQTGDTESVPDPQPIGEPPAAPSGVGSLTMASGGGAPVADNNEGADGVGSSSGNWHCDSQWLGDRVITTSTRTWALPTYNNHLYKQISNSTSGGSSNDNAYFGYSTPWGYFDFNRFHCHFSPRDWQRLINNNWGFRPKRLNFKLFNIQVKEVTDNNGVKTIANNLTSTVQVFTDSDYQLPYVLGSAHEGCLPPFPADVFMIPQYGYLTLNDGSQAVGRSSFYCLEYFPSQMLRTGNNFQFSYEFENVPFHSSYAHSQSLDRLMNPLIDQYLYYLSKYIVGSGSPHSKAQNQQTLKFSVAGPSNMAVQGRNYIPGPSYRQQRVSTTVTQNNNSEFAWPGASSWALNGRNSLMNPGPAMASHKEGEDRFFPLSGSLIFGKQGTGRDNVDADKVMITNEEEIKTTNPVATESYGQVATNHQSAQAQAQTGWVQNQGILPGMVWQDRDVYLQGPIWAKIPHTDGNFHPSPLMGGFGMKHPPPQILIKNTPVPADPPTAFNKDKLNSFITQYSTGQVSVEIEWELQKENSKRWNPEIQYTSNYYKSNNVEFAVNTEGVYSEPRPIGTRYLTRNL

SEQ ID NO: 49 - protein, 742 aa, synthetic construct
MAADGYLPDWLEDNLSEGIREWWALKPGAPQPKANQQHQDNARGLVLPGYKYLGPGNGLDKGEPVNAADAAALEHDKAYDQQLKAGDNPYLKYNHADAEFQERLKEDTSFGGNLGRAVFQAKKRLLEPLGLVEEAAKTAPGKKRPVEQSPQEPDSSAGIGKSGAQPAKKRLNFGQTGDTESVPDPQPIGEPPAAPSGVGSLTMASGGGAPVADNNEGADGVGSSSGNWHCDSQWLGDRVITTSTRTWALPTYNNHLYKQISNSTSGGSSNDNAYFGYSTPWGYFDFNRFHCHFSPRDWQRLINNNWGFRPKRLNFKLFNIQVKEVTDNNGVKTIANNLTSTVQVFTDSDYQLPYVLGSAHEGCLPPFPADVFMIPQYGYLTLNDGSQAVGRSSFYCLEYFPSQMLRTGNNFQFSYEFENVPFHSSYAHSQSLDRLMNPLIDQYLYYLSKTISKRGSPHSKAQNQQTLKFSVAGPSNMAVQGRNYIPGPSYRQQRVSTTVTQNNNSEFAWPGASSWALNGRNSLMNPGPAMASHKEGEDRFFPLSGSLIFGKQGTGRDNVDADKVMITNEEEIKTTNPVATESYGQVATNHQSAQAQAQTGWVQNQGILPGMVWQDRDVYLQGPIWAKIPHTDGNFHPSPLMGGFGMKHPPPQILIKNTPVPADPPTAFNKDKLNSFITQYSTGQVSVEIEWELQKENSKRWNPEIQYTSNYYKSNNVEFAVNTEGVYSEPRPIGTRYLTRNL

SEQ ID NO: 50 - protein, 742 aa, synthetic construct
MAADGYLPDWLEDNLSEGIREWWALKPGAPQPKANQQHQDNARGLVLPGYKYLGPGNGLDKGEPVNAADAAALEHDKAYDQQLKAGDNPYLKYNHADAEFQERLKEDTSFGGNLGRAVFQAKKRLLEPLGLVEEAAKTAPGKKRPVEQSPQEPDSSAGIGKSGAQPAKKRLNFGQTGDTESVPDPQPIGEPPAAPSGVGSLTMASGGGAPVADNNEGADGVGSSSGNWHCDSQWLGDRVITTSTRTWALPTYNNHLYKQISNSTSGGSSNDNAYFGYSTPWGYFDFNRFHCHFSPRDWQRLINNNWGFRPKRLNFKLFNIQVKEVTDNNGVKTIANNLTSTVQVFTDSDYQLPYVLGSAHEGCLPPFPADVFMIPQYGYLTLNDGSQAVGRSSFYCLEYFPSQMLRTGNNFQFSYEFENVPFHSSYAHSQSLDRLMNPLIDQYLYYLSKGLGGSGSPHSKAQNQQTLKFSVAGPSNMAVQGRNYIPGPSYRQQRVSTTVTQNNNSEFAWPGASSWALNGRNSLMNPGPAMASHKEGEDRFFPLSGSLIFGKQGTGRDNVDADKVMITNEEEIKTTNPVATESYGQVATNHQSAQAQAQTGWVQNQGILPGMVWQDRDVYLQGPIWAKIPHTDGNFHPSPLMGGFGMKHPPPQILIKNTPVPADPPTAFNKDKLNSFITQYSTGQVSVEIEWELQKENSKRWNPEIQYTSNYYKSNNVEFAVNTEGVYSEPRPIGTRYLTRNL

SEQ ID NO: 51 - protein, 742 aa, synthetic construct
MAADGYLPDWLEDNLSEGIREWWALKPGAPQPKANQQHQDNARGLVLPGYKYLGPGNGLDKGEPVNAADAAALEHDKAYDQQLKAGDNPYLKYNHADAEFQERLKEDTSFGGNLGRAVFQAKKRLLEPLGLVEEAAKTAPGKKRPVEQSPQEPDSSAGIGKSGAQPAKKRLNFGQTGDTESVPDPQPIGEPPAAPSGVGSLTMASGGGAPVADNNEGADGVGSSSGNWHCDSQWLGDRVITTSTRTWALPTYNNHLYKQISNSTSGGSSNDNAYFGYSTPWGYFDFNRFHCHFSPRDWQRLINNNWGFRPKRLNFKLFNIQVKEVTDNNGVKTIANNLTSTVQVFTDSDYQLPYVLGSAHEGCLPPFPADVFMIPQYGYLTLNDGSQAVGRSSFYCLEYFPSQMLRTGNNFQFSYEFENVPFHSSYAHSQSLDRLMNPLIDQYLYYLSKTINGHDSPHSKAQNLQTLKFSVAGPSNMAVQGRNYIPGPSYRQQRVSTTVTQNNNSEFAWPGASSWALNGRNSLMNPGPAMASHKEGEDRFFPLSGSLIFGKQGTGRDNVDADKVMITNEEEIKTTNPVATESYGQVATNHQSAQAQAQTGWVQNQGILPGMVWQDRDVYLQGPIWAKIPHTDGNFHPSPLMGGFGMKHPPPQILIKNTPVPADPPTAFNKDKLNSFITQYSTGQVSVEIEWELQKENSKRWNPEIQYTSNYYKSNNVEFAVNTEGVYSEPRPIGTRYLTRNL

SEQ ID NO: 52 - protein, 742 aa, synthetic construct
MAADGYLPDWLEDNLSEGIREWWALKPGAPQPKANQQHQDNARGLVLPGYKYLGPGNGLDKGEPVNAADAAALEHDKAYDQQLKAGDNPYLKYNHADAEFQERLKEDTSFGGNLGRAVFQAKKRLLEPLGLVEEAAKTAPGKKRPVEQSPQEPDSSAGIGKSGAQPAKKRLNFGQTGDTESVPDPQPIGEPPAAPSGVGSLTMASGGGAPVADNNEGADGVGSSSGNWHCDSQWLGDRVITTSTRTWALPTYNNHLYKQISNSTSGGSSNDNAYFGYSTPWGYFDFNRFHCHFSPRDWQRLINNNWGFRPKRLNFKLFNIQVKEVTDNNGVKTIANNLTSTVQVFTDSDYQLPYVLGSAHEGCLPPFPADVFMIPQYGYLTLNDGSQAVGRSSFYCLEYFPSQMLRTGNNFQFSYEFENVPFHSSYAHSQSLDRLMNPLIDQYLYYLSKTVNGHDSPHSKAQNQQTLKFSVAGPSNMAVQGRNYIPGPSYRQQRVSTTVTQNNNSEFAWPGASSWALNGRNSLMNPGPAMASHKEGEDRFFPLSGSLIFGKQGTGRDNVDADKVMITNEEEIKTTNPVATESYGQVATNHQSAQAQAQTGWVQNQGILPGMVWQDRDVYLQGPIWAKIPHTDGNFHPSPLMGGFGMKHPPPQILIKNTPVPADPPTAFNKDKLNSFITQYSTGQVSVEIEWELQKENSKRWNPEIQYTSNYYKSNNVEFAVNTEGVYSEPRPIGTRYLTRNL

SEQ ID NO: 53 - protein, 742 aa, synthetic construct
MAADGYLPDWLEDNLSEGIREWWALKPGAPQPKANQQHQDNARGLVLPGYKYLGPGNGLDKGEPVNAADAAALEHDKAYDQQLKAGDNPYLKYNHADAEFQERLKEDTSFGGNLGRAVFQAKKRLLEPLGLVEEAAKTAPGKKRPVEQSPQEPDSSAGIGKSGAQPAKKRLNFGQTGDTESVPDPQPIGEPPAAPSGVGSLTMASGGGAPVADNNEGADGVGSSSGNWHCDSQWLGDRVITTSTRTWALPTYNNHLYKQISNSTSGGSSNDNAYFGYSTPWGYFDFNRFHCHFSPRDWQRLINNNWGFRPKRLNFKLFNIQVKEVTDNNGVKTIANNLTSTVQVFTDSDYQLPYVLGSAHEGCLPPFPADVFMIPQYGYLTLNDGSQAVGRSSFYCLEYFPSQMLRTGNNFQFSYEFENVPFHSSYAHSQSLDRLMNPLIDQYLYYLSKTINGHDSPHSKALNQQTLKFSVAGPSNMAVQGRNYIPGPSYRQQRVSTTVTQNNNSEFAWPGASSWALNGRNSLMNPGPAMASHKEGEDRFFPLSGSLIFGKQGTGRDNVDADKVMITNEEEIKTTNPVATESYGQVATNHQSAQAQAQTGWVQNQGILPGMVWQDRDVYLQGPIWAKIPHTDGNFHPSPLMGGFGMKHPPPQILIKNTPVPADPPTAFNKDKLNSFITQYSTGQVSVEIEWELQKENSKRWNPEIQYTSNYYKSNNVEFAVNTEGVYSEPRPIGTRYLTRNL

SEQ ID NO: 54 - protein, 742 aa, synthetic construct
MAADGYLPDWLEDNLSEGIREWWALKPGAPQPKANQQHQDNARGLVLPGYKYLGPGNGLDKGEPVNAADAAALEHDKAYDQQLKAGDNPYLKYNHADAEFQERLKEDTSFGGNLGRAVFQAKKRLLEPLGLVEEAAKTAPGKKRPVEQSPQEPDSSAGIGKSGAQPAKKRLNFGQTGDTESVPDPQPIGEPPAAPSGVGSLTMASGGGAPVADNNEGADGVGSSSGNWHCDSQWLGDRVITTSTRTWALPTYNNHLYKQISNSTSGGSSNDNAYFGYSTPWGYFDFNRFHCHFSPRDWQRLINNNWGFRPKRLNFKLFNIQVKEVTDNNGVKTIANNLTSTVQVFTDSDYQLPYVLGSAHEGCLPPFPADVFMIPQYGYLTLNDGSQAVGRSSFYCLEYFPSQMLRTGNNFQFSYEFENVPFHSSYAHSQSLDRLMNPLIDQYLYYLSKTINGHDSPHSKAQNQQSLKFSVAGPSNMAVQGRNYIPGPSYRQQRVSTTVTQNNNSEFAWPGASSWALNGRNSLMNPGPAMASHKEGEDRFFPLSGSLIFGKQGTGRDNVDADKVMITNEEEIKTTNPVATESYGQVATNHQSAQAQAQTGWVQNQGILPGMVWQDRDVYLQGPIWAKIPHTDGNFHPSPLMGGFGMKHPPPQILIKNTPVPADPPTAFNKDKLNSFITQYSTGQVSVEIEWELQKENSKRWNPEIQYTSNYYKSNNVEFAVNTEGVYSEPRPIGTRYLTRNL

SEQ ID NO: 55 - protein, 742 aa, synthetic construct
MAADGYLPDWLEDNLSEGIREWWALKPGAPQPKANQQHQDNARGLVLPGYKYLGPGNGLDKGEPVNAADAAALEHDKAYDQQLKAGDNPYLKYNHADAEFQERLKEDTSFGGNLGRAVFQAKKRLLEPLGLVEEAAKTAPGKKRPVEQSPQEPDSSAGIGKSGAQPAKKRLNFGQTGDTESVPDPQPIGEPPAAPSGVGSLTMASGGGAPVADNNEGADGVGSSSGNWHCDSQWLGDRVITTSTRTWALPTYNNHLYKQISNSTSGGSSNDNAYFGYSTPWGYFDFNRFHCHFSPRDWQRLINNNWGFRPKRLNFKLFNIQVKEVTDNNGVKTIANNLTSTVQVFTDSDYQLPYVLGSAHEGCLPPFPADVFMIPQYGYLTLNDGSQAVGRSSFYCLEYFPSQMLRTGNNFQFSYEFENVPFHSSYAHSQSLDRLMNPLIDQYLYYLSKTINGHDSPHSKAQNQQILKFSVAGPSNMAVQGRNYIPGPSYRQQRVSTTVTQNNNSEFAWPGASSWALNGRNSLMNPGPAMASHKEGEDRFFPLSGSLIFGKQGTGRDNVDADKVMITNEEEIKTTNPVATESYGQVATNHQSAQAQAQTGWVQNQGILPGMVWQDRDVYLQGPIWAKIPHTDGNFHPSPLMGGFGMKHPPPQILIKNTPVPADPPTAFNKDKLNSFITQYSTGQVSVEIEWELQKENSKRWNPEIQYTSNYYKSNNVEFAVNTEGVYSEPRPIGTRYLTRNL

SEQ ID NO: 56 - protein, 742 aa, synthetic construct
MAADGYLPDWLEDNLSEGIREWWALKPGAPQPKANQQHQDNARGLVLPGYKYLGPGNGLDKGEPVNAADAAALEHDKAYDQQLKAGDNPYLKYNHADAEFQERLKEDTSFGGNLGRAVFQAKKRLLEPLGLVEEAAKTAPGKKRPVEQSPQEPDSSAGIGKSGAQPAKKRLNFGQTGDTESVPDPQPIGEPPAAPSGVGSLTMASGGGAPVADNNEGADGVGSSSGNWHCDSQWLGDRVITTSTRTWALPTYNNHLYKQISNSTSGGSSNDNAYFGYSTPWGYFDFNRFHCHFSPRDWQRLINNNWGFRPKRLNFKLFNIQVKEVTDNNGVKTIANNLTSTVQVFTDSDYQLPYVLGSAHEGCLPPFPADVFMIPQYGYLTLNDGSQAVGRSSFYCLEYFPSQMLRTGNNFQFSYEFENVPFHSSYAHSQSLDRLMNPLIDQYLYYLSKTINGSGSPHFTRQNQQTLKFSVAGPSNMAVQGRNYIPGPSYRQQRVSTTVTQNNNSEFAWPGASSWALNGRNSLMNPGPAMASHKEGEDRFFPLSGSLIFGKQGTGRDNVDADKVMITNEEEIKTTNPVATESYGQVATNHQSAQAQAQTGWVQNQGILPGMVWQDRDVYLQGPIWAKIPHTDGNFHPSPLMGGFGMKHPPPQILIKNTPVPADPPTAFNKDKLNSFITQYSTGQVSVEIEWELQKENSKRWNPEIQYTSNYYKSNNVEFAVNTEGVYSEPRPIGTRYLTRNL

SEQ ID NO: 57 - protein, 742 aa, synthetic construct
MAADGYLPDWLEDNLSEGIREWWALKPGAPQPKANQQHQDNARGLVLPGYKYLGPGNGLDKGEPVNAADAAALEHDKAYDQQLKAGDNPYLKYNHADAEFQERLKEDTSFGGNLGRAVFQAKKRLLEPLGLVEEAAKTAPGKKRPVEQSPQEPDSSAGIGKSGAQPAKKRLNFGQTGDTESVPDPQPIGEPPAAPSGVGSLTMASGGGAPVADNNEGADGVGSSSGNWHCDSQWLGDRVITTSTRTWALPTYNNHLYKQISNSTSGGSSNDNAYFGYSTPWGYFDFNRFHCHFSPRDWQRLINNNWGFRPKRLNFKLFNIQVKEVTDNNGVKTIANNLTSTVQVFTDSDYQLPYVLGSAHEGCLPPFPADVFMIPQYGYLTLNDGSQAVGRSSFYCLEYFPSQMLRTGNNFQFSYEFENVPFHSSYAHSQSLDRLMNPLIDQYLYYLSKTSNGHDSPHSKAQNQQTLKFSVAGPSNMAVQGRNYIPGPSYRQQRVSTTVTQNNNSEFAWPGASSWALNGRNSLMNPGPAMASHKEGEDRFFPLSGSLIFGKQGTGRDNVDADKVMITNEEEIKTTNPVATESYGQVATNHQSAQAQAQTGWVQNQGILPGMVWQDRDVYLQGPIWAKIPHTDGNFHPSPLMGGFGMKHPPPQILIKNTPVPADPPTAFNKDKLNSFITQYSTGQVSVEIEWELQKENSKRWNPEIQYTSNYYKSNNVEFAVNTEGVYSEPRPIGTRYLTRNL

SEQ ID NO: 58 - protein, 742 aa, synthetic construct
MAADGYLPDWLEDNLSEGIREWWALKPGAPQPKANQQHQDNARGLVLPGYKYLGPGNGLDKGEPVNAADAAALEHDKAYDQQLKAGDNPYLKYNHADAEFQERLKEDTSFGGNLGRAVFQAKKRLLEPLGLVEEAAKTAPGKKRPVEQSPQEPDSSAGIGKSGAQPAKKRLNFGQTGDTESVPDPQPIGEPPAAPSGVGSLTMASGGGAPVADNNEGADGVGSSSGNWHCDSQWLGDRVITTSTRTWALPTYNNHLYKQISNSTSGGSSNDNAYFGYSTPWGYFDFNRFHCHFSPRDWQRLINNNWGFRPKRLNFKLFNIQVKEVTDNNGVKTIANNLTSTVQVFTDSDYQLPYVLGSAHEGCLPPFPADVFMIPQYGYLTLNDGSQAVGRSSFYCLEYFPSQMLRTGNNFQFSYEFENVPFHSSYAHSQSLDRLMNPLIDQYLYYLSKTINGSGSPHSLPWNQQTLKFSVAGPSNMAVQGRNYIPGPSYRQQRVSTTVTQNNNSEFAWPGASSWALNGRNSLMNPGPAMASHKEGEDRFFPLSGSLIFGKQGTGRDNVDADKVMITNEEEIKTTNPVATESYGQVATNHQSAQAQAQTGWVQNQGILPGMVWQDRDVYLQGPIWAKIPHTDGNFHPSPLMGGFGMKHPPPQILIKNTPVPADPPTAFNKDKLNSFITQYSTGQVSVEIEWELQKENSKRWNPEIQYTSNYYKSNNVEFAVNTEGVYSEPRPIGTRYLTRNL

SEQ ID NO: 59 - protein, 742 aa, synthetic construct
MAADGYLPDWLEDNLSEGIREWWALKPGAPQPKANQQHQDNARGLVLPGYKYLGPGNGLDKGEPVNAADAAALEHDKAYDQQLKAGDNPYLKYNHADAEFQERLKEDTSFGGNLGRAVFQAKKRLLEPLGLVEEAAKTAPGKKRPVEQSPQEPDSSAGIGKSGAQPAKKRLNFGQTGDTESVPDPQPIGEPPAAPSGVGSLTMASGGGAPVADNNEGADGVGSSSGNWHCDSQWLGDRVITTSTRTWALPTYNNHLYKQISNSTSGGSSNDNAYFGYSTPWGYFDFNRFHCHFSPRDWQRLINNNWGFRPKRLNFKLFNIQVKEVTDNNGVKTIANNLTSTVQVFTDSDYQLPYVLGSAHEGCLPPFPADVFMIPQYGYLTLNDGSQAVGRSSFYCLEYFPSQMLRTGNNFQFSYEFENVPFHSSYAHSQSLDRLMNPLIDQYLYYLSKTINGHDSPHSKAQNHQTLKFSVAGPSNMAVQGRNYIPGPSYRQQRVSTTVTQNNNSEFAWPGASSWALNGRNSLMNPGPAMASHKEGEDRFFPLSGSLIFGKQGTGRDNVDADKVMITNEEEIKTTNPVATESYGQVATNHQSAQAQAQTGWVQNQGILPGMVWQDRDVYLQGPIWAKIPHTDGNFHPSPLMGGFGMKHPPPQILIKNTPVPADPPTAFNKDKLNSFITQYSTGQVSVEIEWELQKENSKRWNPEIQYTSNYYKSNNVEFAVNTEGVYSEPRPIGTRYLTRNL

SEQ ID NO: 60-136 - skipped (77 entries)

SEQ ID NO: 137 - DNA, 2211 bp, synthetic construct
  source 1..2211: mol_type = other DNA
atggctgccgatggttatcttccagattggctcgaggacaaccttagtgaaggaattcgcgagtggtgggctttgaaacctggagcccctcaacccaaggcaaatcaacaacatcaagacaacgctcgaggtcttgtgcttccgggttacaaataccttggacccggcaacggactcgacaagggggagccggtcaacgcagcagacgcggcggccctcgagcacgacaaggcctacgaccagcagctcaaggccggagacaacccgtacctcaagtacaaccacgccgacgccgagttccaggagcggctcaaagaagatacgtcttttgggggcaacctcgggcgagcagtcttccaggccaaaaagaggcttcttgaacctcttggtctggttgaggaagcggctaagacggctcctggaaagaagaggcctgtagagcagtctcctcaggaaccggactcctccgcgggtattggcaaatcgggtgcacagcccgctaaaaagagactcaatttcggtcagactggcgacacagagtcagtcccagaccctcaaccaatcggagaacctcccgcagccccctcaggtgtgggatctcttacaatggcttcaggtggtggcgcaccagtggcagacaataacgaaggtgccgatggagtgggtagttcctcgggaaattggcattgcgattcccaatggctgggggacagagtcatcaccaccagcacccgaacctgggccctgcccacctacaacaatcacctctacaagcaaatctccaacagcacatctggaggatcttcaaatgacaacgcctacttcggctacagcaccccctgggggtattttgacttcaacagattccactgccacttctcaccacgtgactggcagcgactcatcaacaacaactggggattccggcctaagcgactcaacttcaagctcttcaacattcaggtcaaagaggttacggacaacaatggagtcaagaccatcgccaataaccttaccagcacggtccaggtcttcacggactcagactatcagctcccgtacgtgctcgggtcggctcacgagggctgcctcccgccgttcccagcggacgttttcatgattcctcagtacgggtatctgacgcttaatgatggaagccaggccgtgggtcgttcgtccttttactgcctggaatatttcccgtcgcaaatgctaagaacgggtaacaacttccagttcagctacgagtttgagaacgtacctttccatagcagctacgctcacagccaaagcctggaccgactaatgaatccactcatcgaccaatacttgtactatctctcaaagactattaacggttctggacagaatcaacaaacgctaaaattcagtgtggccggacccagcaacatggctgtccagggaagaaactacatacctggacccagctaccgacaacaacgtgtctcaaccactgtgactcaaaacaacaacagcgaatttgcttggcctggagcttcttcttgggctctcaatggacgtaatagcttgatgaatcctggacctgctatggccagccacaaagaaggagaggaccgtttctttcctttgtctggatctttaatttttggcaaacaaggaactggaagagacaacgtggatgcggacaaagtcatgataaccaacgaagaagaaattaaaactactaacccggtagcaacggagtcctatggacaagtggccacaaaccaccagagtgcccaagcacaggcgcagaccggctgggttcaaaaccaaggaatacttccgggtatggtttggcaggacagagatgtgtacctgcaaggacccatttgggccaaaattcctcacacggacggcaactttcacccttctccgctgatgggagggtttggaatgaagcacccgcctcctcagatcctcatcaaaaacacacctgtacctgcggatcctccaacggccttcaacaaggacaagctgaactctttcatcacccagtattctactggccaagtcagcgtggagatcgagtgggagctgcagaaggaaaacagcaagcgctggaacccggagatccagtacacttccaactattacaagtctaataatgttgaatttgctgttaatactgaaggtgtatatagtgaaccccgccccattggcaccagatacctgactcgtaatctgtaa

SEQ ID NO: 138 - protein, 736 aa, synthetic construct
MAADGYLPDWLEDNLSEGIREWWALKPGAPQPKANQQHQDNARGLVLPGYKYLGPGNGLDKGEPVNAADAAALEHDKAYDQQLKAGDNPYLKYNHADAEFQERLKEDTSFGGNLGRAVFQAKKRLLEPLGLVEEAAKTAPGKKRPVEQSPQEPDSSAGIGKSGAQPAKKRLNFGQTGDTESVPDPQPIGEPPAAPSGVGSLTMASGGGAPVADNNEGADGVGSSSGNWHCDSQWLGDRVITTSTRTWALPTYNNHLYKQISNSTSGGSSNDNAYFGYSTPWGYFDFNRFHCHFSPRDWQRLINNNWGFRPKRLNFKLFNIQVKEVTDNNGVKTIANNLTSTVQVFTDSDYQLPYVLGSAHEGCLPPFPADVFMIPQYGYLTLNDGSQAVGRSSFYCLEYFPSQMLRTGNNFQFSYEFENVPFHSSYAHSQSLDRLMNPLIDQYLYYLSKTINGSGQNQQTLKFSVAGPSNMAVQGRNYIPGPSYRQQRVSTTVTQNNNSEFAWPGASSWALNGRNSLMNPGPAMASHKEGEDRFFPLSGSLIFGKQGTGRDNVDADKVMITNEEEIKTTNPVATESYGQVATNHQSAQAQAQTGWVQNQGILPGMVWQDRDVYLQGPIWAKIPHTDGNFHPSPLMGGFGMKHPPPQILIKNTPVPADPPTAFNKDKLNSFITQYSTGQVSVEIEWELQKENSKRWNPEIQYTSNYYKSNNVEFAVNTEGVYSEPRPIGTRYLTRNL

SEQ ID NO: 139-199 - skipped (61 entries)

SEQ ID NO: 200 - protein, 14 aa, synthetic construct
GSGSPHSKAQNQQT

SEQ ID NO: 201 - protein, 14 aa, synthetic construct
GHDSPHKSGQNQQT

SEQ ID NO: 202 - protein, 14 aa, synthetic construct
GSGSPHARMQNQQT

SEQ ID NO: 203 - protein, 14 aa, synthetic construct
GSGSPHVKSQNQQT

SEQ ID NO: 204 - protein, 14 aa, synthetic construct
GQDSPHKSGQNQQT

SEQ ID NO: 205 - protein, 14 aa, synthetic construct
GSGSPHASRQNQQT

SEQ ID NO: 206 - protein, 14 aa, synthetic construct
GSGSPHASRQNKQT

SEQ ID NO: 207 - protein, 14 aa, synthetic construct
GSGSPHVKIQNQQT

SEQ ID NO: 208 - protein, 14 aa, synthetic construct
GSGSPHSKAKNQQT

SEQ ID NO: 209 - protein, 14 aa, synthetic construct
GSGSPHKKNQNQQT

SEQ ID NO: 210 - protein, 14 aa, synthetic construct
GSGSPHVRMQNQQT

SEQ ID NO: 211 - protein, 14 aa, synthetic construct
GSGSPHASRQKQQT

SEQ ID NO: 212 - protein, 14 aa, synthetic construct
GHSSPHRSGQNQQT

SEQ ID NO: 213 - protein, 14 aa, synthetic construct
GMRTYHLSGQNQQT

SEQ ID NO: 214 - protein, 14 aa, synthetic construct
GSGSPHTRGQNQQT

SEQ ID NO: 215 - protein, 14 aa, synthetic construct
GSGIIPVSSQNQQT

SEQ ID NO: 216 - protein, 14 aa, synthetic construct
GSEYGHKSGQNQQT

SEQ ID NO: 217 - protein, 14 aa, synthetic construct
GRGQNVSSVHRQQT

SEQ ID NO: 218 - protein, 14 aa, synthetic construct
GSSHRFYGGQNQQT

SEQ ID NO: 219 - protein, 14 aa, synthetic construct
GYFVAAWSGQNQQT

SEQ ID NO: 220 - protein, 14 aa, synthetic construct
GSVLHSHAAQNQQT

SEQ ID NO: 221 - protein, 14 aa, synthetic construct
GSGDLVVSTQNQQT

SEQ ID NO: 222 - protein, 14 aa, synthetic construct
GSYGMAASGQNQQT

SEQ ID NO: 223 - protein, 14 aa, synthetic construct
GLNHFGASGQNQQT

SEQ ID NO: 224 - protein, 14 aa, synthetic construct
GSTGSHSAGQNQHT

SEQ ID NO: 225 - protein, 14 aa, synthetic construct
GLAGHTVSGQNQQT

SEQ ID NO: 226 - protein, 14 aa, synthetic construct
GIILGASSGQNQQT

SEQ ID NO: 227 - protein, 14 aa, synthetic construct
GSGVSTYNIQNQQT

SEQ ID NO: 228 - protein, 14 aa, synthetic construct
GSLVSVQTGQNQQT

SEQ ID NO: 229 - protein, 14 aa, synthetic construct
GQSSPHRSGQNQQT

SEQ ID NO: 230 - protein, 14 aa, synthetic construct
GREYGHKSGQNQQT

SEQ ID NO: 231 - protein, 14 aa, synthetic construct
GHTLTLSSGQNQQT

SEQ ID NO: 232 - protein, 14 aa, synthetic construct
GSITLIPSGQNQQT

SEQ ID NO: 233 - protein, 14 aa, synthetic construct
GSNGFTALGQNQQT

SEQ ID NO: 234 - protein, 14 aa, synthetic construct
GSGHSSHSVQNQQT

SEQ ID NO: 235 - protein, 14 aa, synthetic construct
GSGIPQRSGKNQQT

SEQ ID NO: 236 - protein, 14 aa, synthetic construct
GSGDTLHMLQNQQT

SEQ ID NO: 237 - protein, 14 aa, synthetic construct
GERHTVLSGQNQQT

SEQ ID NO: 238 - protein, 14 aa, synthetic construct
GSGMPQSHIQNQQT

SEQ ID NO: 239 - protein, 14 aa, synthetic construct
GSGQLSGIGGNQQT

SEQ ID NO: 240 - protein, 14 aa, synthetic construct
GSGQNRKPASFAQT

SEQ ID NO: 241 - protein, 14 aa, synthetic construct
GSGSVSQLGQNQQT

SEQ ID NO: 242 - protein, 14 aa, synthetic construct
GSDFLGTHGQNQQT

SEQ ID NO: 243 - protein, 14 aa, synthetic construct
GQIVQNPSGQNQQT

SEQ ID NO: 244 - protein, 14 aa, synthetic construct
GSGTQIPSQQNQQT

SEQ ID NO: 245 - protein, 14 aa, synthetic construct
GSGQNQQSAREGLT

SEQ ID NO: 246 - protein, 14 aa, synthetic construct
GSGLGMSTGQNQQT

SEQ ID NO: 247 - protein, 14 aa, synthetic construct
GSGLPVLSGQNQQT

SEQ ID NO: 248 - protein, 14 aa, synthetic construct
GSGHSIRTDQNQQT

SEQ ID NO: 249 - protein, 14 aa, synthetic construct
GSGQSVQTVVNQQT

SEQ ID NO: 250 - protein, 14 aa, synthetic construct
GSGQNRAQSRFQQT

SEQ ID NO: 251 - protein, 14 aa, synthetic construct
GGGDLGRSSQNQQT

SEQ ID NO: 252 - protein, 14 aa, synthetic construct
GGGTKMDSGQNQQT

SEQ ID NO: 253 - protein, 14 aa, synthetic construct
GSGSPHPSRQNQQT

SEQ ID NO: 254 - protein, 14 aa, synthetic construct
GSGQFTNAGMNQQT

SEQ ID NO: 255 - protein, 14 aa, synthetic construct
GGRNGHTVGQNQQT

SEQ ID NO: 256 - protein, 14 aa, synthetic construct
GSGFGPQTGQNQQT

SEQ ID NO: 257 - protein, 14 aa, synthetic construct
GRTDSHTSGQNQQT

SEQ ID NO: 258 - protein, 14 aa, synthetic construct
GYEVLGSSGQNQQT

SEQ ID NO: 259 - protein, 14 aa, synthetic construct
GSVHLSVTGQNQQT

SEQ ID NO: 260 - protein, 14 aa, synthetic construct
GFMSYKGSGQNQQT

SEQ ID NO: 261 - protein, 14 aa, synthetic construct
GNIAGSVSGQNQQT

SEQ ID NO: 262 - protein, 14 aa, synthetic construct
GSGSHRDVSQNQQT

SEQ ID NO: 263 - protein, 14 aa, synthetic construct
GGLGSMSSGQNQQT

SEQ ID NO: 264 - protein, 14 aa, synthetic construct
GSGHLPQSAQNQQT

SEQ ID NO: 265 - protein, 14 aa, synthetic construct
GGVLVGGSGQNQQT

SEQ ID NO: 266 - protein, 14 aa, synthetic construct
GTHPYTSSGQNQQT

SEQ ID NO: 267 - protein, 14 aa, synthetic construct
GSGQNQQLKENRST

SEQ ID NO: 268 - protein, 14 aa, synthetic construct
GSGQNQQTSPHNHT

SEQ ID NO: 269 - protein, 14 aa, synthetic construct
GSGTLYPQSQNQQT

SEQ ID NO: 270 - protein, 14 aa, synthetic construct
GSGQNQQSNWITKT

SEQ ID NO: 271 - protein, 14 aa, synthetic construct
GSGYTSLFLQNQQT

SEQ ID NO: 272 - protein, 14 aa, synthetic construct
GSGVMTHVLQNQQT

SEQ ID NO: 273 - protein, 14 aa, synthetic construct
GSVSDVRAGQNQQT

SEQ ID NO: 274 - protein, 14 aa, synthetic construct
GSGQSHMATLNQQT

SEQ ID NO: 275 - protein, 14 aa, synthetic construct
GSGLSVHLAQNQQT

SEQ ID NO: 276 - protein, 14 aa, synthetic construct
GSGLSHATQQNQQT

SEQ ID NO: 277 - protein, 14 aa, synthetic construct
GSGLSVQSGQNQQT

SEQ ID NO: 278 - protein, 14 aa, synthetic construct
GSGHMTYREKNQQT

SEQ ID NO: 279 - protein, 14 aa, synthetic construct
GSKGVPTPGQNQQT

SEQ ID NO: 280 - protein, 14 aa, synthetic construct
GSGLLPLSSQNQQT

SEQ ID NO: 281 - protein, 14 aa, synthetic construct
GNGLYAVSGQNQQT

SEQ ID NO: 282 - protein, 14 aa, synthetic construct
GFNGSPSSGQNQQT

SEQ ID NO: 283 - protein, 14 aa, synthetic construct
GSGQIRHSDQNQQT

SEQ ID NO: 284 - protein, 14 aa, synthetic construct
GGQVAPSSGQNQQT

SEQ ID NO: 285 - protein, 14 aa, synthetic construct
GSFSMHTHGQNQQT

SEQ ID NO: 286 - protein, 14 aa, synthetic construct
GSGQNQQVIQGSNT

SEQ ID NO: 287 - protein, 14 aa, synthetic construct
GRVLHSHAGQNQQT

SEQ ID NO: 288 - protein, 14 aa, synthetic construct
GSGQNQQTSLQDQT

SEQ ID NO: 289 - protein, 14 aa, synthetic construct
GSGLGRAPVQNQQT

SEQ ID NO: 290 - protein, 14 aa, synthetic construct
GNGFSSASGQNQQT

SEQ ID NO: 291 - protein, 14 aa, synthetic construct
GSGQMASRESNQQT

SEQ ID NO: 292 - protein, 14 aa, synthetic construct
GPGLPNHSGQNQQT

SEQ ID NO: 293 - protein, 14 aa, synthetic construct
GNIQWQGSGQNQQT

SEQ ID NO: 294 - protein, 14 aa, synthetic construct
GMSAHMSSGQNQQT

SEQ ID NO: 295 - protein, 14 aa, synthetic construct
GHSFVNRSGQNQQT

SEQ ID NO: 296 - protein, 14 aa, synthetic construct
GRAVMDHSGQNQQT

SEQ ID NO: 297 - protein, 14 aa, synthetic construct
GALTVMQSGQNQQT

SEQ ID NO: 298 - protein, 14 aa, synthetic construct
GSGQRSPVLPNQQT

SEQ ID NO: 299 - protein, 14 aa, synthetic construct
GSGQNGHLSLKQQT

SEQ ID NO: 300 - protein, 14 aa, synthetic construct
GSLPRGTSDQNQQT

SEQ ID NO: 301 - protein, 14 aa, synthetic construct
GVAGSLVSGQNQQT

SEQ ID NO: 302 - protein, 14 aa, synthetic construct
GRGGIPQSGQNQQT

SEQ ID NO: 303 - protein, 14 aa, synthetic construct
GSGQYASSIPNQQT

SEQ ID NO: 304 - protein, 14 aa, synthetic construct
GTDFGRQSSQNQQT

SEQ ID NO: 305 - protein, 14 aa, synthetic construct
GIFMQTPSGQNQQT

SEQ ID NO: 306 - protein, 14 aa, synthetic construct
GSGQNQQTRLVDLT

SEQ ID NO: 307 - protein, 14 aa, synthetic construct
GTREMPLSGQNQQT

SEQ ID NO: 308 - protein, 14 aa, synthetic construct
GSRLVHVHGQNQQT

SEQ ID NO: 309 - protein, 14 aa, synthetic construct
GSGRLVPNGPNQQT

SEQ ID NO: 310 - protein, 14 aa, synthetic construct
GSGYLRESPQNQQT

SEQ ID NO: 311 - protein, 14 aa, synthetic construct
GARIQNASGQKQQT

SEQ ID NO: 312 - protein, 14 aa, synthetic construct
GLSNPMPSGQNQQT

SEQ ID NO: 313 - protein, 14 aa, synthetic construct
GSTVQDTRGQNQQT

SEQ ID NO: 314 - protein, 14 aa, synthetic construct
GPFGMPSSGQNQQT

SEQ ID NO: 315 - protein, 14 aa, synthetic construct
GSGQNHGVLSNQQT

SEQ ID NO: 316 - protein, 14 aa, synthetic construct
GSGYSMSQAQNQQT

SEQ ID NO: 317 - protein, 14 aa, synthetic construct
GSGMLTHTLQNQQT

SEQ ID NO: 318 - protein, 14 aa, synthetic construct
GRGSPHASRQNQQT

SEQ ID NO: 319 - protein, 14 aa, synthetic construct
GLSWPSTSGQNQQT

SEQ ID NO: 320 - protein, 14 aa, synthetic construct
GNSMERTSGQNQQT

SEQ ID NO: 321 - protein, 14 aa, synthetic construct
GSGMSPSTLQNQQT

SEQ ID NO: 322 - protein, 14 aa, synthetic construct
GSGHGQVLSQNQQT

SEQ ID NO: 323 - protein, 14 aa, synthetic construct
GRGQIYSTGGNQQT

SEQ ID NO: 324 - protein, 14 aa, synthetic construct
GVVAAHNSGQNQQT

SEQ ID NO: 325 - protein, 14 aa, synthetic construct
GDSSLRHSGQNQQT

SEQ ID NO: 326 - protein, 14 aa, synthetic construct
GSLVSQGAGQNQQT

SEQ ID NO: 327 - protein, 14 aa, synthetic construct
GSLLQAHSGQNQQT

SEQ ID NO: 328 - protein, 14 aa, synthetic construct
GSGHIYVGIQNQQT

SEQ ID NO: 329 - protein, 14 aa, synthetic construct
GHHTTVQSGQNQQT

SEQ ID NO: 330 - protein, 14 aa, synthetic construct
GSRQSKRNELNQQT

SEQ ID NO: 331 - protein, 14 aa, synthetic construct
GSGQNQQHVSSPRT

SEQ ID NO: 332 - protein, 14 aa, synthetic construct
GSSKELLWGQNQQT

SEQ ID NO: 333 - protein, 14 aa, synthetic construct
GSLSTPSSGQNQQT

SEQ ID NO: 334 - protein, 14 aa, synthetic construct
GSIGYAGQGQNQQT

SEQ ID NO: 335 - protein, 14 aa, synthetic construct
GSGQNQRVSNSQQT

SEQ ID NO: 336 - protein, 14 aa, synthetic construct
GSGYASHVQQNQQT

SEQ ID NO: 337 - protein, 14 aa, synthetic construct
GSGEYSRSGQNQQT

SEQ ID NO: 338 - protein, 14 aa, synthetic construct
GSVSTHSSGQNQQT

SEQ ID NO: 339 - protein, 14 aa, synthetic construct
GSGQNQHSLGNYQT

SEQ ID NO: 340 - protein, 14 aa, synthetic construct
GSGGLDTRGQNQQT

SEQ ID NO: 341 - protein, 14 aa, synthetic construct
GNILHATSGQNQQT

SEQ ID NO: 342 - protein, 14 aa, synthetic construct
GSGQSYTMTQNQQT

SEQ ID NO: 343 - protein, 14 aa, synthetic construct
GSGQNQHSAPNSQT

SEQ ID NO: 344 - protein, 14 aa, synthetic construct
GSGQNQQTMDHNRT

SEQ ID NO: 345 - protein, 14 aa, synthetic construct
GSNGGVGTGQNQQT

SEQ ID NO: 346 - protein, 14 aa, synthetic construct
GAGSIIPSGQNQQT

SEQ ID NO: 347 - protein, 14 aa, synthetic construct
GSGQTHGGQHNQQT

SEQ ID NO: 348 - protein, 14 aa, synthetic construct
GSNLSFQSGQNQQT

SEQ ID NO: 349 - protein, 14 aa, synthetic construct
GATLQVHSGQNQQT

SEQ ID NO: 350 - protein, 14 aa, synthetic construct
GSGFNQRSEQNQQT

SEQ ID NO: 351 - protein, 14 aa, synthetic construct
GSGSLRDFDQNQQT

SEQ ID NO: 352 - protein, 14 aa, synthetic construct
GSGDSITGKQNQQT

SEQ ID NO: 353 - protein, 14 aa, synthetic construct
GSGQDRNIVQNQQT

SEQ ID NO: 354 - protein, 14 aa, synthetic construct
GSGLSHSHQQNQQT

SEQ ID NO: 355 - protein, 14 aa, synthetic construct
GSGQNQQTGMSSVK

SEQ ID NO: 356 - protein, 14 aa, synthetic construct
GSVTHGISGQNQQT

SEQ ID NO: 357 - protein, 14 aa, synthetic construct
GVVAHQPSGQNQQT

SEQ ID NO: 358 - protein, 14 aa, synthetic construct
GSGPILGQLQNQQT

SEQ ID NO: 359 - protein, 14 aa, synthetic construct
GSGHVPNSGLNQQT

SEQ ID NO: 360 - protein, 14 aa, synthetic construct
GDAGVRSSGQNQQT

SEQ ID NO: 361 - protein, 14 aa, synthetic construct
GSGSQLMSLQNQQT

SEQ ID NO: 362 - protein, 14 aa, synthetic construct
GSGLDYSQRQNQQT

SEQ ID NO: 363 - protein, 14 aa, synthetic construct
GSGQSSGRLINKQT

SEQ ID NO: 364 - protein, 14 aa, synthetic construct
GSSVSPSSGQNQQT

SEQ ID NO: 365 - protein, 14 aa, synthetic construct
GSGQVVGLSGNQQT

SEQ ID NO: 366 - protein, 14 aa, synthetic construct
GSNMGVPLGQNQQT

SEQ ID NO: 367 - protein, 14 aa, synthetic construct
GSFYPSSTGQNQQT

SEQ ID NO: 368 - protein, 14 aa, synthetic construct
GSGQNQQTRLTDLT

SEQ ID NO: 369 - protein, 14 aa, synthetic construct
GPTNGRSSGQNQQT

SEQ ID NO: 370 - protein, 14 aa, synthetic construct
GSGLLHGKLQNQQT

SEQ ID NO: 371 - protein, 14 aa, synthetic construct
GANMGHVSGQNQQT

SEQ ID NO: 372 - protein, 14 aa, synthetic construct
GSGQNQQSGRGDLT

SEQ ID NO: 373 - protein, 14 aa, synthetic construct
GSHGHYASGQKQQT

SEQ ID NO: 374 - protein, 14 aa, synthetic construct
GSGDLRISPQNQQT

SEQ ID NO: 375 - protein, 14 aa, synthetic construct
GSGMPVILGQNQQT

SEQ ID NO: 376 - protein, 14 aa, synthetic construct
GRGVITSSGQNHQT

SEQ ID NO: 377 - protein, 14 aa, synthetic construct
GSGHSVSGPQNQQT

SEQ ID NO: 378 - protein, 14 aa, synthetic construct
GSRNGHTVGRNQQT

SEQ ID NO: 379 - protein, 14 aa, synthetic construct
GAGVHMVSGQNQQT

SEQ ID NO: 380 - protein, 14 aa, synthetic construct
GSGQNHRPSVLQQT

SEQ ID NO: 381 - protein, 14 aa, synthetic construct
GSGSPRDSIQNQQT

SEQ ID NO: 382 - protein, 14 aa, synthetic construct
GSGQGIHSSVNQQT

SEQ ID NO: 383 - protein, 14 aa, synthetic construct
GSGQQLSITPNQQT

SEQ ID NO: 384 - protein, 14 aa, synthetic construct
GGYHSQTSGQNQQT

SEQ ID NO: 385 - protein, 14 aa, synthetic construct
GSLHHDNHGQNQQT

SEQ ID NO: 386 - protein, 14 aa, synthetic construct
GIMARDSSGQNQQT

SEQ ID NO: 387 - protein, 14 aa, synthetic construct
GVVHITNSGQNQQT

SEQ ID NO: 388 - protein, 14 aa, synthetic construct
GSGQNQHSAPFNQT

SEQ ID NO: 389 - protein, 14 aa, synthetic construct
GSGQTSGLKQNQQT

SEQ ID NO: 390 - protein, 14 aa, synthetic construct
GSGQNQQTSLSNTA

SEQ ID NO: 391 - protein, 14 aa, synthetic construct
GSGQNQAVHNKSQT

SEQ ID NO: 392 - protein, 14 aa, synthetic construct
GVHTHLPSGQNQQT

SEQ ID NO: 393 - protein, 14 aa, synthetic construct
GHLTMHNSGQNHQT

SEQ ID NO: 394 - protein, 14 aa, synthetic construct
GSGSSSRPYQNQQT

SEQ ID NO: 395 - protein, 14 aa, synthetic construct
GILLATPSGQNQQT

SEQ ID NO: 396 - protein, 14 aa, synthetic construct
GSGQNAGSFPNQQT

SEQ ID NO: 397 - protein, 14 aa, synthetic construct
GSRDGHTVGQNQQT

SEQ ID NO: 398 - protein, 14 aa, synthetic construct
GSLLISTSGQNQQT

SEQ ID NO: 399 - protein, 14 aa, synthetic construct
GSGAMPSHGQNQQT

SEQ ID NO: 400 - protein, 14 aa, synthetic construct
GALVSPISGQNQQT

SEQ ID NO: 401 - protein, 14 aa, synthetic construct
GSLSSHGVGQNQQT

SEQ ID NO: 402 - protein, 14 aa, synthetic construct
GSGQNQQASLAMRT

SEQ ID NO: 403 - protein, 14 aa, synthetic construct
GPGLGSHSGQNQQT

SEQ ID NO: 404 - protein, 14 aa, synthetic construct
GHDSQHKSGQNQQT

SEQ ID NO: 405 - protein, 14 aa, synthetic construct
GSGLTLSATQNQQT

SEQ ID NO: 406 - protein, 14 aa, synthetic construct
GSGQVVAHVGNQQT

SEQ ID NO: 407 - protein, 14 aa, synthetic construct
GSGLRTMTTQNQQT

SEQ ID NO: 408 - protein, 14 aa, synthetic construct
GSGQVGRLLQNQQT

SEQ ID NO: 409 - protein, 14 aa, synthetic construct
GSGQLSHQSVNQQT

SEQ ID NO: 410 - protein, 14 aa, synthetic construct
GSGDRYQTLQNQQT

SEQ ID NO: 411 - protein, 14 aa, synthetic construct
GSGQNQQLKSSAQT

SEQ ID NO: 412 - protein, 14 aa, synthetic construct
GSGQNQYSIPVAQT

SEQ ID NO: 413 - protein, 14 aa, synthetic construct
GSGERLHLTQNQQT

SEQ ID NO: 414 - protein, 14 aa, synthetic construct
GSGHNQQVRTAPNT

SEQ ID NO: 415 - protein, 14 aa, synthetic construct
GGLSHVMSGQNQQT

SEQ ID NO: 416 - protein, 14 aa, synthetic construct
GSGQSHRDVLNQQT

SEQ ID NO: 417 - protein, 14 aa, synthetic construct
GSGQNLAGRMDQQT

SEQ ID NO: 418 - protein, 14 aa, synthetic construct
GSGQNQQTNRGNPM

SEQ ID NO: 419 - protein, 14 aa, synthetic construct
GSGQSYQRDHNQQT

SEQ ID NO: 420 - protein, 14 aa, synthetic construct
GSLLSAGMGQNQHT

SEQ ID NO: 421 - protein, 14 aa, synthetic construct
GSGQNQQTAIYRNI

SEQ ID NO: 422 - protein, 14 aa, synthetic construct
GSGQNQQTSGTTNC

SEQ ID NO: 423 - protein, 14 aa, synthetic construct
GMTSHSVSGQNQQT

SEQ ID NO: 424 - protein, 14 aa, synthetic construct
GSSQSTGYQPNQQT

SEQ ID NO: 425 - protein, 14 aa, synthetic construct
GSLKPTTLGQNQQT

SEQ ID NO: 426 - protein, 14 aa, synthetic construct
GRMFSLGSGQNQQT

SEQ ID NO: 427 - protein, 14 aa, synthetic construct
GSGQNQQTALGVKC

SEQ ID NO: 428 - protein, 14 aa, synthetic construct
GAMVSHSSGQNQQT

SEQ ID NO: 429 - protein, 14 aa, synthetic construct
GSGQNQQRNSDSVT

SEQ ID NO: 430 - protein, 14 aa, synthetic construct
GSGQSMTLHLNQQT

SEQ ID NO: 431 - protein, 14 aa, synthetic construct
GSGQVHQAEVNQQT

SEQ ID NO: 432 - protein, 14 aa, synthetic construct
GSGQNQSQNHLQQT

SEQ ID NO: 433 - protein, 14 aa, synthetic construct
GSLLTTASGQNQQT

SEQ ID NO: 434 - protein, 14 aa, synthetic construct
GSGLIRTAAQNQQT

SEQ ID NO: 435 - protein, 14 aa, synthetic construct
GSGQNQQTVSRQST

SEQ ID NO: 436 - protein, 14 aa, synthetic construct
GSGQYANHGINQQT

SEQ ID NO: 437 - protein, 14 aa, synthetic construct
GSRSTGPSGQNQQT

SEQ ID NO: 438 - protein, 14 aa, synthetic construct
GRGVQQKLQQNQQT

SEQ ID NO: 439 - protein, 14 aa, synthetic construct
GSGQNQQVHLSTGT

SEQ ID NO: 440 - protein, 14 aa, synthetic construct
GSGQNQQLSAKSST

SEQ ID NO: 441 - protein, 14 aa, synthetic construct
GSGYKAARPQNQQT

SEQ ID NO: 442 - protein, 14 aa, synthetic construct
GSAGISPSGQNQQT

SEQ ID NO: 443 - protein, 14 aa, synthetic construct
GSGQNRAHAFLQQT

SEQ ID NO: 444 - protein, 14 aa, synthetic construct
GSGLSGITMQNQQT

SEQ ID NO: 445 - protein, 14 aa, synthetic construct
GPGSAHSSGQNQQT

SEQ ID NO: 446 - protein, 14 aa, synthetic construct
GSSHTQALGQNQQT

SEQ ID NO: 447 - protein, 14 aa, synthetic construct
GSGVHGVSSQNQQT

SEQ ID NO: 448 - protein, 14 aa, synthetic construct
GSSGRDMGGQNQQT

SEQ ID NO: 449 - protein, 14 aa, synthetic construct
GERAFPTSGQNQQT

SEQ ID NO: 450 - protein, 14 aa, synthetic construct
GGRIVSLSGQNQQT

SEQ ID NO: 451 - protein, 14 aa, synthetic construct
GSGQNSYSHTSQQT

SEQ ID NO: 452 - protein, 14 aa, synthetic construct
GLGYPGSSGQNQQT

SEQ ID NO: 453 - protein, 14 aa, synthetic construct
GSGPQSHTGQNQQT

SEQ ID NO: 454 - protein, 14 aa, synthetic construct
GSGQNQQLSRDAST

SEQ ID NO: 455 - protein, 14 aa, synthetic construct
GSGQILHSVPNQQT

SEQ ID NO: 456 - protein, 14 aa, synthetic construct
GSGFHTDSRQNQQT

SEQ ID NO: 457 - protein, 14 aa, synthetic construct
GSGQSHSLATNQQT

SEQ ID NO: 458 - protein, 14 aa, synthetic construct
GSGQNQQTLSKPWT

SEQ ID NO: 459 - protein, 14 aa, synthetic construct
GSGHAAISQQNQQT

SEQ ID NO: 460 - protein, 14 aa, synthetic construct
GSGQNQQQIGGNST

SEQ ID NO: 461 - protein, 14 aa, synthetic construct
GGGPMAGSGQNQQT

SEQ ID NO: 462 - protein, 14 aa, synthetic construct
GMRMEYQSGQNQQT

SEQ ID NO: 463 - protein, 14 aa, synthetic construct
GSGQNQQGTLLHQT

SEQ ID NO: 464 - protein, 14 aa, synthetic construct
GSGQNQRSSGGVQT

SEQ ID NO: 465 - protein, 14 aa, synthetic construct
GSGQNQRGALATQT

SEQ ID NO: 466 - protein, 14 aa, synthetic construct
GSGTVHAATQNQQT

SEQ ID NO: 467 - protein, 14 aa, synthetic construct
GSRMTQQFGQNQQT

SEQ ID NO: 468 - protein, 14 aa, synthetic construct
GSSSPGASGQNQQT

SEQ ID NO: 469 - protein, 14 aa, synthetic construct
GHPSPHVSGQNQQT

SEQ ID NO: 470 - protein, 14 aa, synthetic construct
GSGSHHASRQNQQT

SEQ ID NO: 471 - protein, 14 aa, synthetic construct
GAVGHSYSGQNQQT

SEQ ID NO: 472 - protein, 14 aa, synthetic construct
GSRSQYDIGQNQQT

SEQ ID NO: 473 - protein, 14 aa, synthetic construct
GSGQGPQERGNQQT

SEQ ID NO: 474 - protein, 14 aa, synthetic construct
GSIAHVGTGQNQQT

SEQ ID NO: 475 - protein, 14 aa, synthetic construct
GSGQNQQKQNHGNT

SEQ ID NO: 476 - protein, 14 aa, synthetic construct
GSGQNQQALGSQRT

SEQ ID NO: 477 - protein, 14 aa, synthetic construct
GSGAITHMPQNQQT

SEQ ID NO: 478 - protein, 14 aa, synthetic construct
GSGQRNPLLLNQQT

SEQ ID NO: 479 - protein, 14 aa, synthetic construct
GSSGIPVSHQNQQT

SEQ ID NO: 480 - protein, 14 aa, synthetic construct
GVHSLTPSGQNQQT

SEQ ID NO: 481 - protein, 14 aa, synthetic construct
GVIVLHGSGQNQQT

SEQ ID NO: 482 - protein, 14 aa, synthetic construct
GGTRVVDSGQNQQT

SEQ ID NO: 483 - protein, 14 aa, synthetic construct
GSGGVTYQSQNQQT

SEQ ID NO: 484 - protein, 14 aa, synthetic construct
GSGQNQAGHGPGQT

SEQ ID NO: 485 - protein, 14 aa, synthetic construct
GSGQLVTSGPNQQT

SEQ ID NO: 486 - protein, 14 aa, synthetic construct
GSGIAAQRTQNQQT

SEQ ID NO: 487 - protein, 14 aa, synthetic construct
GSTPAGVGGQNQQT

SEQ ID NO: 488 - protein, 14 aa, synthetic construct
GSGQNQQTSTGVHS

SEQ ID NO: 489 - protein, 14 aa, synthetic construct
GSGQIRQLVDNQQT

SEQ ID NO: 490 - protein, 14 aa, synthetic construct
GSLIGMQSGQNQQT

SEQ ID NO: 491 - protein, 14 aa, synthetic construct
GSGQIKGKMDNQQT

SEQ ID NO: 492 - protein, 14 aa, synthetic construct
GSGSDMSSWQNQQT

SEQ ID NO: 493 - protein, 14 aa, synthetic construct
GRGQNQQHTGLATT

SEQ ID NO: 494 - protein, 14 aa, synthetic construct
GSGQNQQTLYSSNT

SEQ ID NO: 495 - protein, 14 aa, synthetic construct
GSGQTQVLKSNQQT

SEQ ID NO: 496 - protein, 14 aa, synthetic construct
GSRTLSNVGQNQQT

SEQ ID NO: 497 - protein, 14 aa, synthetic construct
GSGVQHSLPQNQQT

SEQ ID NO: 498 - protein, 14 aa, synthetic construct
GNYLHQASGQNQQT

SEQ ID NO: 499 - protein, 14 aa, synthetic construct
GSGGTSVHQQNQQT

SEQ ID NO: 500 - protein, 14 aa, synthetic construct
GMDHSRPSGQNQQT

SEQ ID NO: 501 - protein, 14 aa, synthetic construct
GSGQNQQSMGTFTT

SEQ ID NO: 502 - protein, 14 aa, synthetic construct
GSGQNQQTPLRPPT

SEQ ID NO: 503 - protein, 14 aa, synthetic construct
GSGQNQHHSVSQQT

SEQ ID NO: 504 - protein, 14 aa, synthetic construct
GSGQLRSLSTNQQT

SEQ ID NO: 505 - protein, 14 aa, synthetic construct
GSGSPRQLSQNQQT

SEQ ID NO: 506 - protein, 14 aa, synthetic construct
GSGQNQQTTASSHT

SEQ ID NO: 507 - protein, 14 aa, synthetic construct
GRGQVVSTHQNQQT

SEQ ID NO: 508 - protein, 14 aa, synthetic construct
GSAQVSMVGQNQQT

SEQ ID NO: 509 - protein, 14 aa, synthetic construct
GSSTLVTIGKNQQT

SEQ ID NO: 510 - protein, 14 aa, synthetic construct
GFAHQASSGQNQQT

SEQ ID NO: 511 - protein, 14 aa, synthetic construct
GSGQPVLSISNQQT

SEQ ID NO: 512 - protein, 14 aa, synthetic construct
GSGQSHRSELNQQT

SEQ ID NO: 513 - protein, 14 aa, synthetic construct
GSSVGSPIGQNQQT

SEQ ID NO: 514 - protein, 14 aa, synthetic construct
GSGMPIRNVQNQQT

SEQ ID NO: 515 - protein, 14 aa, synthetic construct
GSSTRVDSGQNQQT

SEQ ID NO: 516 - protein, 14 aa, synthetic construct
GSGQNQQTAMRSTT

SEQ ID NO: 517 - protein, 14 aa, synthetic construct
GSGQNQQHSSSHLT

SEQ ID NO: 518 - protein, 14 aa, synthetic construct
GSRNGHAVGQNQQT

SEQ ID NO: 519 - protein, 14 aa, synthetic construct
GLGAYQSSGQNQQT

SEQ ID NO: 520 - protein, 14 aa, synthetic construct
GPGLSGHSGQNQQT

SEQ ID NO: 521 - protein, 14 aa, synthetic construct
GSTGIVSSGQNQQT

SEQ ID NO: 522 - protein, 14 aa, synthetic construct
GSRTTQVIGQNQQT

SEQ ID NO: 523 - protein, 14 aa, synthetic construct
GSGLLHRAQQNQQT

SEQ ID NO: 524 - protein, 14 aa, synthetic construct
GSGQNAQQAAAQQT

SEQ ID NO: 525 - protein, 14 aa, synthetic construct
GSGQNQQSALRTQT

SEQ ID NO: 526 - protein, 14 aa, synthetic construct
GSGFLSDTRQNQQT

SEQ ID NO: 527 - protein, 14 aa, synthetic construct
GSGLLYHDQQNQQT

SEQ ID NO: 528 - protein, 14 aa, synthetic construct
GSGQNQHYSLHKQT

SEQ ID NO: 529 - protein, 14 aa, synthetic construct
GSGHSPLPQQNQQT

SEQ ID NO: 530 - protein, 14 aa, synthetic construct
GNGHSMRPNQNQQT

SEQ ID NO: 531 - protein, 14 aa, synthetic construct
GSGLKWSTLQNQQT

SEQ ID NO: 532 - protein, 14 aa, synthetic construct
GSGQMGRQAVNQQT

SEQ ID NO: 533 - protein, 14 aa, synthetic construct
GSGQNQQTSGVLTL

SEQ ID NO: 534 - protein, 14 aa, synthetic construct
GSGQNQQALHNPHT

SEQ ID NO: 535 - protein, 14 aa, synthetic construct
GSGQNQQVIPNSKT

SEQ ID NO: 536 - protein, 14 aa, synthetic construct
GSPLQDRVGQNQQT

SEQ ID NO: 537 - protein, 14 aa, synthetic construct
GSGQNQYSSTNPQT

SEQ ID NO: 538 - protein, 14 aa, synthetic construct
GAMTVTISGQNQQT

SEQ ID NO: 539 - protein, 14 aa, synthetic construct
GSGQNQQLQTLIRT

SEQ ID NO: 540 - protein, 14 aa, synthetic construct
GSGLRQTSQQNQQT

SEQ ID NO: 541 - protein, 14 aa, synthetic construct
GSGQNQQTGLRQQT

SEQ ID NO: 542 - protein, 14 aa, synthetic construct
GSGQTRQMKDNQQT

SEQ ID NO: 543 - protein, 14 aa, synthetic construct
GSGQNHGLQSGQQT

SEQ ID NO: 544 - protein, 14 aa, synthetic construct
GSGQSHRQPENQQT

SEQ ID NO: 545 - protein, 14 aa, synthetic construct
GSGQDRHIVQNQQT

SEQ ID NO: 546 - protein, 14 aa, synthetic construct
GSGQNQQLPHSNLT

SEQ ID NO: 547 - protein, 14 aa, synthetic construct
GSGQLSVPYDNQQT

SEQ ID NO: 548 - protein, 14 aa, synthetic construct
GSGRNPQTQPLQQT

SEQ ID NO: 549 - protein, 14 aa, synthetic construct
GSGQPYSTGLNQQT

SEQ ID NO: 550 - protein, 14 aa, synthetic construct
GSGQNQQTHGGLRD

SEQ ID NO: 551 - protein, 14 aa, synthetic construct
GAYGMVSSGQNQQT

SEQ ID NO: 552 - protein, 14 aa, synthetic construct
GSGIQSSYSQNQQT

SEQ ID NO: 553 - protein, 14 aa, synthetic construct
GPRLSDQSGQNQQT

SEQ ID NO: 554 - protein, 14 aa, synthetic construct
GSGQNQQTHPSPCT

SEQ ID NO: 555 - protein, 14 aa, synthetic construct
GSGQSFQMHTNQQT

SEQ ID NO: 556 - protein, 14 aa, synthetic construct
GSGQNQQTGNPKHT

SEQ ID NO: 557 - protein, 14 aa, synthetic construct
GFSSAVHSGQNQQT

SEQ ID NO: 558 - protein, 14 aa, synthetic construct
GSGQNQQTSMSNAT

SEQ ID NO: 559 - protein, 14 aa, synthetic construct
GSGQDMKQHHNQQT

SEQ ID NO: 560 - protein, 14 aa, synthetic construct
GLRLSTPSGQNQQT

SEQ ID NO: 561 - protein, 14 aa, synthetic construct
GSGQNQQTSVYMNT

SEQ ID NO: 562 - protein, 14 aa, synthetic construct
GSGQNQYSQSSMQT

SEQ ID NO: 563 - protein, 14 aa, synthetic construct
GSGQNQQSMADHTT

SEQ ID NO: 564 - protein, 14 aa, synthetic construct
GWERSFVSGQNQQT

SEQ ID NO: 565 - protein, 14 aa, synthetic construct
GLLAGKSSGQNQQT

SEQ ID NO: 566 - protein, 14 aa, synthetic construct
GKSFVPQSGQNQQT

SEQ ID NO: 567 - protein, 14 aa, synthetic construct
GSGQMQSAGSNQQT

SEQ ID NO: 568 - protein, 14 aa, synthetic construct
GSDQNQRLTSSMQT

SEQ ID NO: 569 - protein, 14 aa, synthetic construct
GESRAVLSGQNQQT

SEQ ID NO: 570 - protein, 14 aa, synthetic construct
GSVFGVPSGQNQQT

SEQ ID NO: 571 - protein, 14 aa, synthetic construct
GSGLPDRNLQNQQT

SEQ ID NO: 572 - protein, 14 aa, synthetic construct
GSGTHNSAIQNQQT

SEQ ID NO: 573 - protein, 14 aa, synthetic construct
GSGMIIASMQNQQT

SEQ ID NO: 574 - protein, 14 aa, synthetic construct
GGITWTDSGQNQQT

SEQ ID NO: 575 - protein, 14 aa, synthetic construct
GSGQNQQASGRQQT

SEQ ID NO: 576 - protein, 14 aa, synthetic construct
GSGQNQQPHLKSLT

SEQ ID NO: 577 - protein, 14 aa, synthetic construct
GPPQHMTSGQNQQT

SEQ ID NO: 578 - protein, 14 aa, synthetic construct
GSGQNQQASLPSRT

SEQ ID NO: 579 - protein, 14 aa, synthetic construct
GSGQIVSTQTNQQT

SEQ ID NO: 580 - protein, 14 aa, synthetic construct
GSGKGHSAGQNQQT

SEQ ID NO: 581 - protein, 14 aa, synthetic construct
GSGQNTRLQLGQQT

SEQ ID NO: 582 - protein, 14 aa, synthetic construct
GSVGSRPVGQNQQT

SEQ ID NO: 583 - protein, 14 aa, synthetic construct
GSSHTLALGQNQQT

SEQ ID NO: 584 - protein, 14 aa, synthetic construct
GMYEYSQSGQNQQT

SEQ ID NO: 585 - protein, 14 aa, synthetic construct
GNGQNQQHSILHGT

SEQ ID NO: 586 - protein, 14 aa, synthetic construct
GSGYNQPHLQNQQT

SEQ ID NO: 587 - protein, 14 aa, synthetic construct
GPLVNASSGQNQQT

SEQ ID NO: 588 - protein, 14 aa, synthetic construct
GSGQNQQVLTTART

SEQ ID NO: 589 - protein, 14 aa, synthetic construct
GSGQNQHSVHNDQT

SEQ ID NO: 590 - protein, 14 aa, synthetic construct
GAGLIMHSGQNQQT

SEQ ID NO: 591 - protein, 14 aa, synthetic construct
GMGRHSASGQNQQT

SEQ ID NO: 592 - protein, 14 aa, synthetic construct
GSHSQSGHGQNQQT

SEQ ID NO: 593 - protein, 14 aa, synthetic construct
GSSTTIVSGQNHQT

SEQ ID NO: 594 - protein, 14 aa, synthetic construct
GRHLVTASGQNQQT

SEQ ID NO: 595 - protein, 14 aa, synthetic construct
GSGQNQQHANLNQT

SEQ ID NO: 596 - protein, 14 aa, synthetic construct
GSGSTHSKAQNQQT

SEQ ID NO: 597 - protein, 14 aa, synthetic construct
GSGQNKQMLSGNTT

SEQ ID NO: 598 - protein, 14 aa, synthetic construct
GSGQVHNPTQNQQT

SEQ ID NO: 599 - protein, 14 aa, synthetic construct
GSGQNQQIPHVHQT

SEQ ID NO: 600 - protein, 14 aa, synthetic construct
GSLHAGLSGQNQQT

SEQ ID NO: 601 - protein, 14 aa, synthetic construct
GPAQHGTSGQNQQT

SEQ ID NO: 602 - protein, 14 aa, synthetic construct
GEKAVTSSGQNQQT

SEQ ID NO: 603 - protein, 14 aa, synthetic construct
GSGQNQQTMANGQR

SEQ ID NO: 604 - protein, 14 aa, synthetic construct
GSGSPHSKDQNQQT

SEQ ID NO: 605 - protein, 14 aa, synthetic construct
GSFSMGYGGQNQQT

SEQ ID NO: 606 - protein, 14 aa, synthetic construct
GSGTHLVSLQNQQT

SEQ ID NO: 607 - protein, 14 aa, synthetic construct
GSGQMQPHVQNQQT

SEQ ID NO: 608 - protein, 14 aa, synthetic construct
GSGQNQQVAGLNNT

SEQ ID NO: 609 - protein, 14 aa, synthetic construct
GSSQNQQHDMRLRT

SEQ ID NO: 610 - protein, 14 aa, synthetic construct
GPASLPISGQNQQT

SEQ ID NO: 611 - protein, 14 aa, synthetic construct
GSGQNQQPPLATRT

SEQ ID NO: 612 - protein, 14 aa, synthetic construct
GSSRVPVSGQNQQT

SEQ ID NO: 613 - protein, 14 aa, synthetic construct
GSGQNQQTNLGHTT

SEQ ID NO: 614 - protein, 14 aa, synthetic construct
GSGQNQQLVSRVQT

SEQ ID NO: 615 - protein, 14 aa, synthetic construct
GPNSYPVSGQKQQT

SEQ ID NO: 616 - protein, 14 aa, synthetic construct
GHAHYQASGQNQQT

SEQ ID NO: 617 - protein, 14 aa, synthetic construct
GSGQALLSTGNQQT

SEQ ID NO: 618 - protein, 14 aa, synthetic construct
GSGQLPRQMTNQQT

SEQ ID NO: 619 - protein, 14 aa, synthetic construct
GSGFPKSTEQNQQT

SEQ ID NO: 620 - protein, 14 aa, synthetic construct
GSRETSLSGQNQQT

SEQ ID NO: 621 - protein, 14 aa, synthetic construct
GSGQNQQGTGVSHT

SEQ ID NO: 622 - protein, 14 aa, synthetic construct
GSRTVPVYGQNQQT

SEQ ID NO: 623 - protein, 14 aa, synthetic construct
GSNAQSAHGQNQQT

SEQ ID NO: 624 - protein, 14 aa, synthetic construct
GAFHLAASGQNQQT

SEQ ID NO: 625 - protein, 14 aa, synthetic construct
GSGQYRSSSDNQQT

SEQ ID NO: 626 - protein, 14 aa, synthetic construct
GSGQVYISTPNQQT

SEQ ID NO: 627 - protein, 14 aa, synthetic construct
GSGVSTQLLQNQQT

SEQ ID NO: 628 - protein, 14 aa, synthetic construct
GSGQLGLSVTNQQT

SEQ ID NO: 629 - protein, 14 aa, synthetic construct
GSGSNMRLSQNQQT

SEQ ID NO: 630 - protein, 14 aa, synthetic construct
GSGQNLHSGLPQQT

SEQ ID NO: 631 - protein, 14 aa, synthetic construct
GSSHTLALGQNKQT

SEQ ID NO: 632 - protein, 14 aa, synthetic construct
GSGQNQHSLPAHRT

SEQ ID NO: 633 - protein, 14 aa, synthetic construct
GSGQNQGTVYPNQT

SEQ ID NO: 634 - protein, 14 aa, synthetic construct
GSGQNQQPSLRQST

SEQ ID NO: 635 - protein, 14 aa, synthetic construct
GSGQNARLKDNQQT

SEQ ID NO: 636 - protein, 14 aa, synthetic construct
GHAGSTGSGQNQQT

SEQ ID NO: 637 - protein, 14 aa, synthetic construct
GSGQALSSSGNQQT

SEQ ID NO: 638 - protein, 14 aa, synthetic construct
GSGASESHRQNQQT

SEQ ID NO: 639 - protein, 14 aa, synthetic construct
GVGVITSSGQNQQT

SEQ ID NO: 640 - protein, 14 aa, synthetic construct
GSLYGQSLGQNQQT

SEQ ID NO: 641 - protein, 14 aa, synthetic construct
GSGQMSDVHGNQQT

SEQ ID NO: 642 - protein, 14 aa, synthetic construct
GSGQNQQHSSKATT

SEQ ID NO: 643 - protein, 14 aa, synthetic construct
GSGQNQQTSVSQQT

SEQ ID NO: 644 - protein, 14 aa, synthetic construct
GSGQKMWKLDNQQT

SEQ ID NO: 645 - protein, 14 aa, synthetic construct
GSGQNVSMQVNQQT

SEQ ID NO: 646 - protein, 14 aa, synthetic construct
GSGQNQRATLSNQT

SEQ ID NO: 647 - protein, 14 aa, synthetic construct
GSGQASSKSANQQT

SEQ ID NO: 648 - protein, 14 aa, synthetic construct
GSGKNQTPIPKGQT

SEQ ID NO: 649 - protein, 14 aa, synthetic construct
GSGQNQQTRQEGST

SEQ ID NO: 650 - protein, 14 aa, synthetic construct
GASSLATSGQNQQT

SEQ ID NO: 651 - protein, 14 aa, synthetic construct
GSGQRGSLTENQQT

SEQ ID NO: 652 - protein, 14 aa, synthetic construct
GSEQTRQRGQNQQT

SEQ ID NO: 653 - protein, 14 aa, synthetic construct
GSGQNQQTLTASKE

SEQ ID NO: 654 - protein, 14 aa, synthetic construct
GSGTSGKTGKNQQT

SEQ ID NO: 655 - protein, 14 aa, synthetic construct
GQLVTFTSGQNQQT

SEQ ID NO: 656 - protein, 14 aa, synthetic construct
GSGQNQQSANKILT

SEQ ID NO: 657 - protein, 14 aa, synthetic construct
GSGQNQQHHSSHTT

SEQ ID NO: 658 - protein, 14 aa, synthetic construct
GSGQNQKGMQPNQT

SEQ ID NO: 659 - protein, 14 aa, synthetic construct
GSGQLVSGLYNQQT

SEQ ID NO: 660 - protein, 14 aa, synthetic construct
GSSVGVPSGQNQQT

SEQ ID NO: 661 - protein, 14 aa, synthetic construct
GSGQNQQWDSRRQT

SEQ ID NO: 662 - protein, 14 aa, synthetic construct
GSEQTRQSGQNQQT

SEQ ID NO: 663 - protein, 14 aa, synthetic construct
GSGIGSHIPQNQQT

SEQ ID NO: 664 - protein, 14 aa, synthetic construct
GSGQNQRLHGVDQT

SEQ ID NO: 665 - protein, 14 aa, synthetic construct
GEVSRVLSGQNQQT

SEQ ID NO: 666 - protein, 14 aa, synthetic construct
GSGQNQQKVSPLLT

SEQ ID NO: 667 - protein, 14 aa, synthetic construct
GSGLALERSQNQQT

SEQ ID NO: 668 - protein, 14 aa, synthetic construct
GPDRIGSSGQNQQT

SEQ ID NO: 669 - protein, 14 aa, synthetic construct
GSGQNQDHQNKQQT

SEQ ID NO: 670 - protein, 14 aa, synthetic construct
GSGQNQQTALYNNT

SEQ ID NO: 671 - protein, 14 aa, synthetic construct
GSGAVHLTAQNQQT

SEQ ID NO: 672 - protein, 14 aa, synthetic construct
GSLVSTQSGQNQQT

SEQ ID NO: 673 - protein, 14 aa, synthetic construct
GSGVSARMVQNQQT

SEQ ID NO: 674 - protein, 14 aa, synthetic construct
GSGQTRMPLANQQT

SEQ ID NO: 675 - protein, 14 aa, synthetic construct
GSGISSRNMQNQQT

SEQ ID NO: 676 - protein, 14 aa, synthetic construct
GSGEKVHSGQNQQT

SEQ ID NO: 677 - protein, 14 aa, synthetic construct
GSGQNQQKLSSMST

SEQ ID NO: 678 - protein, 14 aa, synthetic construct
GSGQNQQTGQHMRV

SEQ ID NO: 679 - protein, 14 aa, synthetic construct
GSGMIHTTAQNQQT

SEQ ID NO: 680 - protein, 14 aa, synthetic construct
GSGQNWPALKGQQT

SEQ ID NO: 681 - protein, 14 aa, synthetic construct
GASHMSISGQNQQT

SEQ ID NO: 682 - protein, 14 aa, synthetic construct
GSDQNQQLGYSKQT

SEQ ID NO: 683 - protein, 14 aa, synthetic construct
GIPSIRESGQNQQT

SEQ ID NO: 684 - protein, 14 aa, synthetic construct
GSGIPSVKFQNQQT

SEQ ID NO: 685 - protein, 14 aa, synthetic construct
GSGQNQQTSVSQNV

SEQ ID NO: 686 - protein, 14 aa, synthetic construct
GSGQNQQIGESRMT

SEQ ID NO: 687 - protein, 14 aa, synthetic construct
GSGSSSMSFQNQQT

SEQ ID NO: 688 - protein, 14 aa, synthetic construct
GSGQKQERAVSKQT

SEQ ID NO: 689 - protein, 14 aa, synthetic construct
GCTTRLNSGQNQQT

SEQ ID NO: 690 - protein, 14 aa, synthetic construct
GSGQNQQIISTKIT

SEQ ID NO: 691 - protein, 14 aa, synthetic construct
GSGQNQQKSLNGNT

SEQ ID NO: 692 - protein, 14 aa, synthetic construct
GSGIPAPRLQNQQT

SEQ ID NO: 693 - protein, 14 aa, synthetic construct
GSGQIRESMGNQQT

SEQ ID NO: 694 - protein, 14 aa, synthetic construct
GSGQNSGVHFNQQT

SEQ ID NO: 695 - protein, 14 aa, synthetic construct
GSGQNIGHSLPQQT

SEQ ID NO: 696 - protein, 14 aa, synthetic construct
GSGERSISVQNQQT

SEQ ID NO: 697 - protein, 14 aa, synthetic construct
GSGLKPNVLQNQQT

SEQ ID NO: 698 - protein, 14 aa, synthetic construct
GSGQVAYAQGNQQT

SEQ ID NO: 699 - protein, 14 aa, synthetic construct
GSGQSSYGSGNQQT

SEQ ID NO: 700 - protein, 14 aa, synthetic construct
GSGQNQAMTHGDQT

SEQ ID NO: 701 - protein, 14 aa, synthetic construct
GSGQNQALVSMGQT

SEQ ID NO: 702 - protein, 14 aa, synthetic construct
GSGQNPSFMRGQQT

SEQ ID NO: 703 - protein, 14 aa, synthetic construct
GSGQNQQSHLRTNT

SEQ ID NO: 704 - protein, 14 aa, synthetic construct
GYTRLETSGQNQQT

SEQ ID NO: 705 - protein, 14 aa, synthetic construct
GSGQSYDMRGNQQT

SEQ ID NO: 706 - protein, 14 aa, synthetic construct
GSRTTQDIGQNQQT

SEQ ID NO: 707 - protein, 14 aa, synthetic construct
GSGHPYKAAQNQQT

SEQ ID NO: 708 - protein, 14 aa, synthetic construct
GRLSNAHGGQNQQT

SEQ ID NO: 709 - protein, 14 aa, synthetic construct
GSGQNQRAVLNDQT

SEQ ID NO: 710 - protein, 14 aa, synthetic construct
GGSHTYGGGQNQQT

SEQ ID NO: 711 - protein, 14 aa, synthetic construct
GSSVNSMIGQNQQT

SEQ ID NO: 712 - protein, 14 aa, synthetic construct
GNSSMMGSGQNQQT

SEQ ID NO: 713 - protein, 14 aa, synthetic construct
GNRDRPSSGQNQQT

SEQ ID NO: 714 - protein, 14 aa, synthetic construct
GSGNMHASRQNQQT

SEQ ID NO: 715 - protein, 14 aa, synthetic construct
GFIFPKVSGQNQQT

SEQ ID NO: 716 - protein, 14 aa, synthetic construct
GSGQNQQLKNSTST

SEQ ID NO: 717 - protein, 14 aa, synthetic construct
GSGQNQQSQYMPRT

SEQ ID NO: 718 - protein, 14 aa, synthetic construct
GSGQRMADIGNQQT

SEQ ID NO: 719 - protein, 14 aa, synthetic construct
GSGQNQSHYPSQQT

SEQ ID NO: 720 - protein, 14 aa, synthetic construct
GSDGKMHRGQNQQT

SEQ ID NO: 721 - protein, 14 aa, synthetic construct
GSGSVGFIGQNQQT

SEQ ID NO: 722 - protein, 14 aa, synthetic construct
GLHGMTLSGQNQQT

SEQ ID NO: 723 - protein, 14 aa, synthetic construct
GSDQSKRGDSNQQT

SEQ ID NO: 724 - protein, 14 aa, synthetic construct
GSLFLATGGQNQQT

SEQ ID NO: 725 - protein, 14 aa, synthetic construct
GSGQNQQPSAFSKT

SEQ ID NO: 726 - protein, 14 aa, synthetic construct
GSGQLPQSGLNQQT

SEQ ID NO: 727 - protein, 14 aa, synthetic construct
GSGSKQNALQNQQT

SEQ ID NO: 728 - protein, 14 aa, synthetic construct
GSGQRRELSQNQQT

SEQ ID NO: 729 - protein, 14 aa, synthetic construct
GSGQREPKASNQQT

SEQ ID NO: 730 - protein, 14 aa, synthetic construct
GSGQNQQHPSTQQT

SEQ ID NO: 731 - protein, 14 aa, synthetic construct
GSQSTLGLGQNQQT

SEQ ID NO: 732 - protein, 14 aa, synthetic construct
GSGQNQQMPGLSST

SEQ ID NO: 733 - protein, 14 aa, synthetic construct
GSGQNQQTVGGKNL

SEQ ID NO: 734 - protein, 14 aa, synthetic construct
GSSREFHSGQNQQT

SEQ ID NO: 735 - protein, 14 aa, synthetic construct
GSGQNQQTVPSNLV

SEQ ID NO: 736 - protein, 14 aa, synthetic construct
GSGQNAYSSQAQQT

SEQ ID NO: 737 - protein, 14 aa, synthetic construct
GSGQNKDHSTRRQT

SEQ ID NO: 738 - protein, 14 aa, synthetic construct
GQLGSVGSGQDQQT

SEQ ID NO: 739 - protein, 14 aa, synthetic construct
GSGQHAAPGHNQQT

SEQ ID NO: 740 - protein, 14 aa, synthetic construct
GSGQNQQTSQSPPT

SEQ ID NO: 741 - protein, 14 aa, synthetic construct
GSGNYRDHEQNQQT

SEQ ID NO: 742 - protein, 14 aa, synthetic construct
GSGQHSNQHVNQQT

SEQ ID NO: 743 - protein, 14 aa, synthetic construct
GSGQTARNGINQQT

SEQ ID NO: 744 - protein, 14 aa, synthetic construct
GSGQNQQHYGSQGT

SEQ ID NO: 745 - protein, 14 aa, synthetic construct
GSGSPQASRQNQQT

SEQ ID NO: 746 - protein, 14 aa, synthetic construct
GSGFSHSMGKNQQT

SEQ ID NO: 747 - protein, 14 aa, synthetic construct
GSGQSHSLETNQQT

SEQ ID NO: 748 - protein, 14 aa, synthetic construct
GTEQTRQSGQNQQT

SEQ ID NO: 749 - protein, 14 aa, synthetic construct
GSGRHLASVQNQQT

SEQ ID NO: 750 - protein, 14 aa, synthetic construct
GLGSKNHSGQNQQT

SEQ ID NO: 751 - protein, 14 aa, synthetic construct
GSGQNQQTSHFPSA

SEQ ID NO: 752 - protein, 14 aa, synthetic construct
GSGQLSGTPQNQQT

SEQ ID NO: 753 - protein, 14 aa, synthetic construct
GSGQNQQAPHKKET

SEQ ID NO: 754 - protein, 14 aa, synthetic construct
GSGQNQQTLRGSLE

SEQ ID NO: 755 - protein, 14 aa, synthetic construct
GSIAMTSHGQNQQT

SEQ ID NO: 756 - protein, 14 aa, synthetic construct
GSPGVSPSGQNQQT

SEQ ID NO: 757 - protein, 14 aa, synthetic construct
GSGQNQQTGSSSRV

SEQ ID NO: 758 - protein, 14 aa, synthetic construct
GSGQHLPLLGNQQT

SEQ ID NO: 759 - protein, 14 aa, synthetic construct
GSDHSHRGGQNQQT

SEQ ID NO: 760 - protein, 14 aa, synthetic construct
GSGIVTKLGQNQQT

SEQ ID NO: 761 - protein, 14 aa, synthetic construct
GSGQDVTKTGNQQT

SEQ ID NO: 762 - protein, 14 aa, synthetic construct
GSGQNQQSHGRIGT

SEQ ID NO: 763 - protein, 14 aa, synthetic construct
GSGQNQQINHRSPT

SEQ ID NO: 764 - protein, 14 aa, synthetic construct
GSGDDSRVGQNQQT

SEQ ID NO: 765 - protein, 14 aa, synthetic construct
GSGQSTLKRINQQT

SEQ ID NO: 766 - protein, 14 aa, synthetic construct
GSGSQHSKAQNQQT

SEQ ID NO: 767 - protein, 14 aa, synthetic construct
GSGQNQQHASSNNT

SEQ ID NO: 768 - protein, 14 aa, synthetic construct
GSRTYQVSGQNQQT

SEQ ID NO: 769 - protein, 14 aa, synthetic construct
GSGQNQGLLSSPQT

SEQ ID NO: 770 - protein, 14 aa, synthetic construct
GSGGGLQHNQNQQT

SEQ ID NO: 771 - protein, 14 aa, synthetic construct
GSGQNQQTTAATRM

SEQ ID NO: 772 - protein, 14 aa, synthetic construct
GSGQNQRASILVQT

SEQ ID NO: 773 - protein, 14 aa, synthetic construct
GSGQNLGLLGAQQT

SEQ ID NO: 774 - protein, 14 aa, synthetic construct
GSLDLGRSGQNQQT

SEQ ID NO: 775 - protein, 14 aa, synthetic construct
GNSQVKVSGQNQQT

SEQ ID NO: 776 - protein, 14 aa, synthetic construct
GSSGSHQYGQNQQT

SEQ ID NO: 777 - protein, 14 aa, synthetic construct
GSGQNQQQRDGTLT

SEQ ID NO: 778 - protein, 14 aa, synthetic construct
GRGQHVSVANNQQT

SEQ ID NO: 779 - protein, 14 aa, synthetic construct
GDSSSRISGQNQQT

SEQ ID NO: 780 - protein, 14 aa, synthetic construct
GSGQNQQHSLSSQT

SEQ ID NO: 781 - protein, 14 aa, synthetic construct
GSLMDVHRGQNQQT

SEQ ID NO: 782 - protein, 14 aa, synthetic construct
GSIQYQSSGQNQQT

SEQ ID NO: 783 - protein, 14 aa, synthetic construct
GLGSKNPSGQNQQT

SEQ ID NO: 784 - protein, 14 aa, synthetic construct
GSGQLVLTLQNQQT

SEQ ID NO: 785 - protein, 14 aa, synthetic construct
GSGQNQQTSQPLPG

SEQ ID NO: 786 - protein, 14 aa, synthetic construct
GSGQNQQNLGKLNT

SEQ ID NO: 787 - protein, 14 aa, synthetic construct
GTTAHQPSGQNQQT

SEQ ID NO: 788 - protein, 14 aa, synthetic construct
GSGQNRAQIGTQQT

SEQ ID NO: 789 - protein, 14 aa, synthetic construct
GSGQYVHVSSNQQT

SEQ ID NO: 790 - protein, 14 aa, synthetic construct
GSGQNQQTAHAFNI

SEQ ID NO: 791 - protein, 14 aa, synthetic construct
GSGQNQRTMVATQT

SEQ ID NO: 792 - protein, 14 aa, synthetic construct
GSGQNPIRGAMQQT

SEQ ID NO: 793 - protein, 14 aa, synthetic construct
GSGYVITGSQNQQT

SEQ ID NO: 794 - protein, 14 aa, synthetic construct
GRGPKQSNIQNQQT

SEQ ID NO: 795 - protein, 14 aa, synthetic construct
GSGQNQQTMLGKPC

SEQ ID NO: 796 - protein, 14 aa, synthetic construct
GSGQNQQVGSTVRT

SEQ ID NO: 797 - protein, 14 aa, synthetic construct
GNVTTQKSGQNQQT

SEQ ID NO: 798 - protein, 14 aa, synthetic construct
GSGNPVSHLQNQQT

SEQ ID NO: 799 - protein, 14 aa, synthetic construct
GSLSHMESGQNQQT

SEQ ID NO: 800 - protein, 14 aa, synthetic construct
GRAPTNLSGQNQQT

SEQ ID NO: 801 - protein, 14 aa, synthetic construct
GSGQNQQTVMTARA

SEQ ID NO: 802 - protein, 14 aa, synthetic construct
GSGMPASRLQNQQT

SEQ ID NO: 803 - protein, 14 aa, synthetic construct
GVVRNHQSGQNQQT

SEQ ID NO: 804 - protein, 14 aa, synthetic construct
GSGQNQHSVQVRQT

SEQ ID NO: 805 - protein, 14 aa, synthetic construct
GSGQNTGHLTMQQT

SEQ ID NO: 806 - protein, 14 aa, synthetic construct
GSGQNQQYAGKILT

SEQ ID NO: 807 - protein, 14 aa, synthetic construct
GSGNPHVRNQNQQT

SEQ ID NO: 808 - protein, 14 aa, synthetic construct
GSGQNGGSSNRQQT

SEQ ID NO: 809 - protein, 14 aa, synthetic construct
GSGQRLSQGVNHQT

SEQ ID NO: 810 - protein, 14 aa, synthetic construct
GSGQNAHAKEGQQT

SEQ ID NO: 811 - protein, 14 aa, synthetic construct
GSSPAPNSGQNQQT

SEQ ID NO: 812 - protein, 14 aa, synthetic construct
GLAHKTSSGQNQQT

SEQ ID NO: 813 - protein, 14 aa, synthetic construct
GSGQNQQTPGAHKT

SEQ ID NO: 814 - protein, 14 aa, synthetic construct
GSGQNQQSLSGSFT

SEQ ID NO: 815 - protein, 14 aa, synthetic construct
GSGQNQQSTGTSRT

SEQ ID NO: 816 - protein, 14 aa, synthetic construct
GSGQNQQTVQSNLV

SEQ ID NO: 817 - protein, 14 aa, synthetic construct
GSGQNQQLGSRQCT

SEQ ID NO: 818 - protein, 14 aa, synthetic construct
GSGQNQYLRLELQT

SEQ ID NO: 819 - protein, 14 aa, synthetic construct
GSGQNQQTSPRLQT

SEQ ID NO: 820 - protein, 14 aa, synthetic construct
GSGQNQQTTSSNMT

SEQ ID NO: 821 - protein, 14 aa, synthetic construct
GTASTYNSGQNQQT

SEQ ID NO: 822 - protein, 14 aa, synthetic construct
GSGQNQQTMPQHKI

SEQ ID NO: 823 - protein, 14 aa, synthetic construct
GSGQSHLHTGNQQT

SEQ ID NO: 824 - protein, 14 aa, synthetic construct
GVKGVGHSGQNQQT

SEQ ID NO: 825 - protein, 14 aa, synthetic construct
GSGKVTKQSQNQQT

SEQ ID NO: 826 - protein, 14 aa, synthetic construct
GSGQNQQTALEKSL

SEQ ID NO: 827 - protein, 14 aa, synthetic construct
GSGYKDTYGQNQQT

SEQ ID NO: 828 - protein, 14 aa, synthetic construct
GSGQNQQSGTFLST

SEQ ID NO: 829 - protein, 14 aa, synthetic construct
GSGQNTGQHMMQQT

SEQ ID NO: 830 - protein, 14 aa, synthetic construct
GSGKNQQRPGLDQT

SEQ ID NO: 831 - protein, 14 aa, synthetic construct
GSGQSREISLNQQT

SEQ ID NO: 832 - protein, 14 aa, synthetic construct
GTPTSPSSGQNQQT

SEQ ID NO: 833 - protein, 14 aa, synthetic construct
GKPAGGLSGQNQQT

SEQ ID NO: 834 - protein, 14 aa, synthetic construct
GSGQNHRSADMQQT

SEQ ID NO: 835 - protein, 14 aa, synthetic construct
GSGQNQQTLPSLSL

SEQ ID NO: 836 - protein, 14 aa, synthetic construct
GSPYMGATGQNQQT

SEQ ID NO: 837 - protein, 14 aa, synthetic construct
GSGHAKAVGQNQQT

SEQ ID NO: 838 - protein, 14 aa, synthetic construct
GHMKGVTSGQNQQT

SEQ ID NO: 839 - protein, 14 aa, synthetic construct
GSGQNQKILTLDQT

SEQ ID NO: 840 - protein, 14 aa, synthetic construct
GSGQNQQTKVGHSA

SEQ ID NO: 841 - protein, 14 aa, synthetic construct
GIARTTISGQNQQT

SEQ ID NO: 842 - protein, 14 aa, synthetic construct
GSGQNQQTSVGFRT

SEQ ID NO: 843 - protein, 14 aa, synthetic construct
GSGQNQQTMIANIR

SEQ ID NO: 844 - protein, 14 aa, synthetic construct
GDMTRSSSGQNQQT

SEQ ID NO: 845 - protein, 14 aa, synthetic construct
GSGHMSDLRQNQQT

SEQ ID NO: 846 - protein, 14 aa, synthetic construct
GRGAVMASGQNQQT

SEQ ID NO: 847 - protein, 14 aa, synthetic construct
GSGQNQQLSGKSVT

SEQ ID NO: 848 - protein, 14 aa, synthetic construct
GSHTLVVSGQNQQT

SEQ ID NO: 849 - protein, 14 aa, synthetic construct
GSGPWSAGLQNQQT

SEQ ID NO: 850 - protein, 14 aa, synthetic construct
GSGQHSPHALNQQT

SEQ ID NO: 851 - protein, 14 aa, synthetic construct
GSGQNQQPNSGSMT

SEQ ID NO: 852 - protein, 14 aa, synthetic construct
GSGLAHLGGQNQQT

SEQ ID NO: 853 - protein, 14 aa, synthetic construct
GSSVRYEPKQNQQT

SEQ ID NO: 854 - protein, 14 aa, synthetic construct
GSGQNQQARPLELT

SEQ ID NO: 855 - protein, 14 aa, synthetic construct
GSGQPRSTGINQQT

SEQ ID NO: 856 - protein, 14 aa, synthetic construct
GSGQNQANWVKVQT

SEQ ID NO: 857 - protein, 14 aa, synthetic construct
GSGHLFQSGQNQQT

SEQ ID NO: 858 - protein, 14 aa, synthetic construct
GSGQNRGISISQQT

SEQ ID NO: 859 - protein, 14 aa, synthetic construct
GSGTHYDNRQNQQT

SEQ ID NO: 860 - protein, 14 aa, synthetic construct
GSGQNQQTSTTPLP

SEQ ID NO: 861 - protein, 14 aa, synthetic construct
GSGQVHASQVNQKT

SEQ ID NO: 862 - protein, 14 aa, synthetic construct
GSSGHRESGQNQQT

SEQ ID NO: 863 - protein, 14 aa, synthetic construct
GLSAEKSSGQNQQT

SEQ ID NO: 864 - protein, 14 aa, synthetic construct
GSGQEHRSLANQQT

SEQ ID NO: 865 - protein, 14 aa, synthetic construct
GSGQTVVRIANQQT

SEQ ID NO: 866 - protein, 14 aa, synthetic construct
GSGQNVSSVHRQQT

SEQ ID NO: 867 - protein, 14 aa, synthetic construct
GSGASRMSIQNQQT

SEQ ID NO: 868 - protein, 14 aa, synthetic construct
GVAFIGSSGQNQQT

SEQ ID NO: 869 - protein, 14 aa, synthetic construct
GSGQNQQTVPTRQT

SEQ ID NO: 870 - protein, 14 aa, synthetic construct
GSGQAAKSSQNQQT

SEQ ID NO: 871 - protein, 14 aa, synthetic construct
GSGQNQQVAIRTST

SEQ ID NO: 872 - protein, 14 aa, synthetic construct
GSVHMQNAGQNQQT

SEQ ID NO: 873 - protein, 14 aa, synthetic construct
GSGMRQAGVQNQQT

SEQ ID NO: 874 - protein, 14 aa, synthetic construct
GSGQNQQVGGKTVT

SEQ ID NO: 875 - protein, 14 aa, synthetic construct
GVHDMRVSGQNQQT

SEQ ID NO: 876 - protein, 14 aa, synthetic construct
GSGQHVSVANNQQT

SEQ ID NO: 877 - protein, 14 aa, synthetic construct
GSAAMSVRGQNQQT

SEQ ID NO: 878 - protein, 14 aa, synthetic construct
GVSRGGPSGQNQQT

SEQ ID NO: 879 - protein, 14 aa, synthetic construct
GSGQMVHTIGNQQT

SEQ ID NO: 880 - protein, 14 aa, synthetic construct
GRGGSMAETQNQQT

SEQ ID NO: 881 - protein, 14 aa, synthetic construct
GSGHTNPTRQNQQT

SEQ ID NO: 882 - protein, 14 aa, synthetic construct
GSGEAARYEQNQQT

SEQ ID NO: 883 - protein, 14 aa, synthetic construct
GSGQNERHLVLQQT

SEQ ID NO: 884 - protein, 14 aa, synthetic construct
GSGQNQQSKQQVLT

SEQ ID NO: 885 - protein, 14 aa, synthetic construct
GSGQARAHRGNQQT

SEQ ID NO: 886 - protein, 14 aa, synthetic construct
GSGQNQQPLDTSRT

SEQ ID NO: 887 - protein, 14 aa, synthetic construct
GSGQNQQLANMVTT

SEQ ID NO: 888 - protein, 14 aa, synthetic construct
GSGQMKDLHRNQQT

SEQ ID NO: 889 - protein, 14 aa, synthetic construct
GSGQNQHLSSFVQT

SEQ ID NO: 890 - protein, 14 aa, synthetic construct
GSGQNQQPSSRVTT

SEQ ID NO: 891 - protein, 14 aa, synthetic construct
GSGQNQQLAITLGT

SEQ ID NO: 892 - protein, 14 aa, synthetic construct
GSGQNQQTVGNPAT

SEQ ID NO: 893 - protein, 14 aa, synthetic construct
GSGQNQGRAHPMQT

SEQ ID NO: 894 - protein, 14 aa, synthetic construct
GSGQLIASVVNQQT

SEQ ID NO: 895 - protein, 14 aa, synthetic construct
GSSVRSLVGQNQQT

SEQ ID NO: 896 - protein, 14 aa, synthetic construct
GGAGSAHSGQNQQT

SEQ ID NO: 897 - protein, 14 aa, synthetic construct
GSDQNQQTMSSTRT

SEQ ID NO: 898 - protein, 14 aa, synthetic construct
GSGQNQQMAGAFRT

SEQ ID NO: 899 - protein, 14 aa, synthetic construct
GSLGNLQRGQNQQT

SEQ ID NO: 900 - protein, 14 aa, synthetic construct
GSGPSISHGQNQQT

SEQ ID NO: 901 - protein, 14 aa, synthetic construct
GSGQNQQSSFNVQT

SEQ ID NO: 902 - protein, 14 aa, synthetic construct
GSGQNQQTGQATHN

SEQ ID NO: 903 - protein, 14 aa, synthetic construct
VSGSPHSKAQNQQT

SEQ ID NO: 904 - protein, 14 aa, synthetic construct
CSGSPHSKAQNQQT

SEQ ID NO: 905 - protein, 14 aa, synthetic construct
GSGSPHRKAQNQQT

SEQ ID NO: 906 - protein, 14 aa, synthetic construct
GRGSPHSKAQNQQT

SEQ ID NO: 907 - protein, 14 aa, synthetic construct
GSGSPHSKAQNKQT

SEQ ID NO: 908 - protein, 14 aa, synthetic construct
GSGSPHSKAQTQQT

SEQ ID NO: 909 - protein, 14 aa, synthetic construct
GSGSTHASRQNQQT

SEQ ID NO: 910 - protein, 14 aa, synthetic construct
GSGSPHKYGQNQQT

SEQ ID NO: 911 - protein, 14 aa, synthetic construct
GSGSPHKFGQNQQT

SEQ ID NO: 912 - protein, 14 aa, synthetic construct
VSGSPHKFGQNQQT

SEQ ID NO: 913 - protein, 14 aa, synthetic construct
GSGSPHSKAQNHQT

SEQ ID NO: 914 - protein, 14 aa, synthetic construct
GSGSPHSKAQHQQT

SEQ ID NO: 915 - protein, 14 aa, synthetic construct
GSGSPHKTYQNQQT

SEQ ID NO: 916 - protein, 14 aa, synthetic construct
VSGSPHASRQNQQT

SEQ ID NO: 917 - protein, 14 aa, synthetic construct
GSGSPHKFGKNQQT

SEQ ID NO: 918 - protein, 14 aa, synthetic construct
GSGSPHASRQNQHT

SEQ ID NO: 919 - protein, 14 aa, synthetic construct
GSHSPHKSGQNQQT

SEQ ID NO: 920 - protein, 14 aa, synthetic construct
GSGQNQQRRMSPST

SEQ ID NO: 921 - protein, 14 aa, synthetic construct
GSGSPHSKPQNQQT

SEQ ID NO: 922 - protein, 14 aa, synthetic construct
GSGSPHKFGQKQQT

SEQ ID NO: 923 - protein, 14 aa, synthetic construct
VSGSPHGARQNQQT

SEQ ID NO: 924 - protein, 14 aa, synthetic construct
GSGSPHSKAQKQQT

SEQ ID NO: 925 - protein, 14 aa, synthetic construct
GSHSPHKRGQNQQT

SEQ ID NO: 926 - protein, 14 aa, synthetic construct
GSGQNRQRLKGLET

SEQ ID NO: 927 - protein, 14 aa, synthetic construct
GSGSPHKLGQNQQT

SEQ ID NO: 928 - protein, 14 aa, synthetic construct
GSGSPHKTSKNQQT

SEQ ID NO: 929 - protein, 14 aa, synthetic construct
GSGSPHKIGQNQQT

SEQ ID NO: 930 - protein, 14 aa, synthetic construct
GSGQDSPHVRNQQT

SEQ ID NO: 931 - protein, 14 aa, synthetic construct
GSGSPHKTSQNQQT

SEQ ID NO: 932 - protein, 14 aa, synthetic construct
GSGSPHASRKNQQT

SEQ ID NO: 933 - protein, 14 aa, synthetic construct
GSHSPHKSGQKQQT

SEQ ID NO: 934 - protein, 14 aa, synthetic construct
GSGSPHKTSQKQQT

SEQ ID NO: 935 - protein, 14 aa, synthetic construct
GSGSPHVRGQNKQT

SEQ ID NO: 936 - protein, 14 aa, synthetic construct
GSGSPHKTTQNQQT

SEQ ID NO: 937 - protein, 14 aa, synthetic construct
GSGPVRALRQNQQT

SEQ ID NO: 938 - protein, 14 aa, synthetic construct
GSGSPHVRGQKQQT

SEQ ID NO: 939 - protein, 14 aa, synthetic construct
CSGSPHKTSQNQQT

SEQ ID NO: 940 - protein, 14 aa, synthetic construct
CSHSPHKSGQNQQT

SEQ ID NO: 941 - protein, 6 aa, synthetic construct
SPHSKA

SEQ ID NO: 942 - DNA, 18 bp, synthetic construct
  source 1..18: mol_type = other DNA
agcccacacagcaaagca

SEQ ID NO: 943 - protein, 8 aa, synthetic construct
HDSPHKSG

SEQ ID NO: 944 - DNA, 24 bp, synthetic construct
  source 1..24: mol_type = other DNA
cacgacagcccacacaaaagcgga

SEQ ID NO: 945 - protein, 6 aa, synthetic construct
SPHSKA

SEQ ID NO: 946 - protein, 6 aa, synthetic construct
SPHKSG

SEQ ID NO: 947 - protein, 6 aa, synthetic construct
SPHARM

SEQ ID NO: 948 - protein, 6 aa, synthetic construct
SPHVKS

SEQ ID NO: 949 - protein, 6 aa, synthetic construct
SPHASR

SEQ ID NO: 950 - protein, 6 aa, synthetic construct
SPHVKI

SEQ ID NO: 951 - protein, 6 aa, synthetic construct
SPHKSR

SEQ ID NO: 952 - protein, 6 aa, synthetic construct
SPHSLR

SEQ ID NO: 953 - protein, 6 aa, synthetic construct
SPHSKW

SEQ ID NO: 954 - protein, 6 aa, synthetic construct
SPHKKN

SEQ ID NO: 955 - protein, 6 aa, synthetic construct
SPHVRM

SEQ ID NO: 956 - protein, 6 aa, synthetic construct
SPHRKA

SEQ ID NO: 957 - protein, 6 aa, synthetic construct
SPHKFG

SEQ ID NO: 958 - protein, 6 aa, synthetic construct
SPHKIG

SEQ ID NO: 959 - protein, 6 aa, synthetic construct
SPHKLG

SEQ ID NO: 960 - protein, 6 aa, synthetic construct
SPHSKL

SEQ ID NO: 961 - protein, 6 aa, synthetic construct
SPHSRG

SEQ ID NO: 962 - protein, 6 aa, synthetic construct
SPHSKS

SEQ ID NO: 963 - protein, 6 aa, synthetic construct
SPHKTS

SEQ ID NO: 964 - protein, 6 aa, synthetic construct
SPHKTT

SEQ ID NO: 965 - protein, 6 aa, synthetic construct
SPHKTY

SEQ ID NO: 966 - protein, 6 aa, synthetic construct
SPHKYG

SEQ ID NO: 967 - protein, 6 aa, synthetic construct
SPHSKD

SEQ ID NO: 968 - protein, 6 aa, synthetic construct
SPHSKP

SEQ ID NO: 969 - protein, 6 aa, synthetic construct
SPHSRA

SEQ ID NO: 970 - protein, 6 aa, synthetic construct
SPHSSR

SEQ ID NO: 971 - protein, 6 aa, synthetic construct
SPHWKA

SEQ ID NO: 972 - protein, 6 aa, synthetic construct
SPHTRG

SEQ ID NO: 973 - protein, 6 aa, synthetic construct
SPHVRG

SEQ ID NO: 974 - protein, 6 aa, synthetic construct
SPHKRG

SEQ ID NO: 975 - protein, 6 aa, synthetic construct
SPHGAR

SEQ ID NO: 976 - protein, 6 aa, synthetic construct
SPHRSG

SEQ ID NO: 977 - protein, 6 aa, synthetic construct
SPHKSA

SEQ ID NO: 978 - protein, 6 aa, synthetic construct
SPHSKR

SEQ ID NO: 979 - protein, 6 aa, synthetic construct
SPHFLR

SEQ ID NO: 980 - protein, 6 aa, synthetic construct
SPHVRR

SEQ ID NO: 981 - protein, 742 aa, synthetic construct
MAADGYLPDWLEDNLSEGIREWWALKPGAPQPKANQQHQDNARGLVLPGYKYLGPGNGLDKGEPVNAADAAALEHDKAYDQQLKAGDNPYLKYNHADAEFQERLKEDTSFGGNLGRAVFQAKKRLLEPLGLVEEAAKTAPGKKRPVEQSPQEPDSSAGIGKSGAQPAKKRLNFGQTGDTESVPDPQPIGEPPAAPSGVGSLTMASGGGAPVADNNEGADGVGSSSGNWHCDSQWLGDRVITTSTRTWALPTYNNHLYKQISNSTSGGSSNDNAYFGYSTPWGYFDFNRFHCHFSPRDWQRLINNNWGFRPKRLNFKLFNIQVKEVTDNNGVKTIANNLTSTVQVFTDSDYQLPYVLGSAHEGCLPPFPADVFMIPQYGYLTLNDGSQAVGRSSFYCLEYFPSQMLRTGNNFQFSYEFENVPFHSSYAHSQSLDRLMNPLIDQYLYYLSKTINGSGSPHSKAQNQQTLKFSVAGPSNMAVQGRNYIPGPSYRQQRVSTTVTQNNNSEFAWPGASSWALNGRNSLMNPGPAMASHKEGEDRFFPLSGSLIFGKQGTGRDNVDADKVMITNEEEIKTTNPVATESYGQVATNHQSAQAQAQTGWVQNQGILPGMVWQDRDVYLQGPIWAKIPHTDGNFHPSPLMGGFGMKHPPPQILIKNTPVPADPPTAFNKDKLNSFITQYSTGQVSVEIEWELQKENSKRWNPEIQYTSNYYKSNNVEFAVNTEGVYSEPRPIGTRYLTRNL

SEQ ID NO: 982 - protein, 742 aa, synthetic construct
MAADGYLPDWLEDNLSEGIREWWALKPGAPQPKANQQHQDNARGLVLPGYKYLGPGNGLDKGEPVNAADAAALEHDKAYDQQLKAGDNPYLKYNHADAEFQERLKEDTSFGGNLGRAVFQAKKRLLEPLGLVEEAAKTAPGKKRPVEQSPQEPDSSAGIGKSGAQPAKKRLNFGQTGDTESVPDPQPIGEPPAAPSGVGSLTMASGGGAPVADNNEGADGVGSSSGNWHCDSQWLGDRVITTSTRTWALPTYNNHLYKQISNSTSGGSSNDNAYFGYSTPWGYFDFNRFHCHFSPRDWQRLINNNWGFRPKRLNFKLFNIQVKEVTDNNGVKTIANNLTSTVQVFTDSDYQLPYVLGSAHEGCLPPFPADVFMIPQYGYLTLNDGSQAVGRSSFYCLEYFPSQMLRTGNNFQFSYEFENVPFHSSYAHSQSLDRLMNPLIDQYLYYLSKTINGHDSPHKSGQNQQTLKFSVAGPSNMAVQGRNYIPGPSYRQQRVSTTVTQNNNSEFAWPGASSWALNGRNSLMNPGPAMASHKEGEDRFFPLSGSLIFGKQGTGRDNVDADKVMITNEEEIKTTNPVATESYGQVATNHQSAQAQAQTGWVQNQGILPGMVWQDRDVYLQGPIWAKIPHTDGNFHPSPLMGGFGMKHPPPQILIKNTPVPADPPTAFNKDKLNSFITQYSTGQVSVEIEWELQKENSKRWNPEIQYTSNYYKSNNVEFAVNTEGVYSEPRPIGTRYLTRNL

SEQ ID NO: 983 - DNA, 2229 bp, synthetic construct
  source 1..2229: mol_type = other DNA
atggctgccgatggttatcttccagattggctcgaggacaaccttagtgaaggaattcgcgagtggtgggctttgaaacctggagcccctcaacccaaggcaaatcaacaacatcaagacaacgctcgaggtcttgtgcttccgggttacaaataccttggacccggcaacggactcgacaagggggagccggtcaacgcagcagacgcggcggccctcgagcacgacaaggcctacgaccagcagctcaaggccggagacaacccgtacctcaagtacaaccacgccgacgccgagttccaggagcggctcaaagaagatacgtcttttgggggcaacctcgggcgagcagtcttccaggccaaaaagaggcttcttgaacctcttggtctggttgaggaagcggctaagacggctcctggaaagaagaggcctgtagagcagtctcctcaggaaccggactcctccgcgggtattggcaaatcgggtgcacagcccgctaaaaagagactcaatttcggtcagactggcgacacagagtcagtcccagaccctcaaccaatcggagaacctcccgcagccccctcaggtgtgggatctcttacaatggcttcaggtggtggcgcaccagtggcagacaataacgaaggtgccgatggagtgggtagttcctcgggaaattggcattgcgattcccaatggctgggggacagagtcatcaccaccagcacccgaacctgggccctgcccacctacaacaatcacctctacaagcaaatctccaacagcacatctggaggatcttcaaatgacaacgcctacttcggctacagcaccccctgggggtattttgacttcaacagattccactgccacttctcaccacgtgactggcagcgactcatcaacaacaactggggattccggcctaagcgactcaacttcaagctcttcaacattcaggtcaaagaggttacggacaacaatggagtcaagaccatcgccaataaccttaccagcacggtccaggtcttcacggactcagactatcagctcccgtacgtgctcgggtcggctcacgagggctgcctcccgccgttcccagcggacgttttcatgattcctcagtacgggtatctgacgcttaatgatggaagccaggccgtgggtcgttcgtccttttactgcctggaatatttcccgtcgcaaatgctaagaacgggtaacaacttccagttcagctacgagtttgagaacgtacctttccatagcagctacgctcacagccaaagcctggaccgactaatgaatccactcatcgaccaatacttgtattacttgagtaaaacaattaacggaagcggaagcccacacagcaaagcacaaaaccaacagaccttgaagttttcggtagctggtcctagcaacatggctgtccagggaagaaactacatacctggacccagctaccgacaacaacgtgtctcaaccactgtgactcaaaacaacaacagcgaatttgcttggcctggagcttcttcttgggctctcaatggacgtaatagcttgatgaatcctggacctgctatggccagccacaaagaaggagaggaccgtttctttcctttgtctggatctttaatttttggcaaacaaggaactggaagagacaacgtggatgcggacaaagtcatgataaccaacgaagaagaaattaaaactactaacccggtagcaacggagtcctatggacaagtggccacaaaccaccagagtgcccaagcacaggcgcagaccggctgggttcaaaaccaaggaatacttccgggtatggtttggcaggacagagatgtgtacctgcaaggacccatttgggccaaaattcctcacacggacggcaactttcacccttctccgctgatgggagggtttggaatgaagcacccgcctcctcagatcctcatcaaaaacacacctgtacctgcggatcctccaacggccttcaacaaggacaagctgaactctttcatcacccagtattctactggccaagtcagcgtggagatcgagtgggagctgcagaaggaaaacagcaagcgctggaacccggagatccagtacacttccaactattacaagtctaataatgttgaatttgctgttaatactgaaggtgtatatagtgaaccccgccccattggcacgcggtatttaacgaggaacttataa

SEQ ID NO: 984 - DNA, 2229 bp, synthetic construct
  source 1..2229: mol_type = other DNA
atggctgccgatggttatcttccagattggctcgaggacaaccttagtgaaggaattcgcgagtggtgggctttgaaacctggagcccctcaacccaaggcaaatcaacaacatcaagacaacgctcgaggtcttgtgcttccgggttacaaataccttggacccggcaacggactcgacaagggggagccggtcaacgcagcagacgcggcggccctcgagcacgacaaggcctacgaccagcagctcaaggccggagacaacccgtacctcaagtacaaccacgccgacgccgagttccaggagcggctcaaagaagatacgtcttttgggggcaacctcgggcgagcagtcttccaggccaaaaagaggcttcttgaacctcttggtctggttgaggaagcggctaagacggctcctggaaagaagaggcctgtagagcagtctcctcaggaaccggactcctccgcgggtattggcaaatcgggtgcacagcccgctaaaaagagactcaatttcggtcagactggcgacacagagtcagtcccagaccctcaaccaatcggagaacctcccgcagccccctcaggtgtgggatctcttacaatggcttcaggtggtggcgcaccagtggcagacaataacgaaggtgccgatggagtgggtagttcctcgggaaattggcattgcgattcccaatggctgggggacagagtcatcaccaccagcacccgaacctgggccctgcccacctacaacaatcacctctacaagcaaatctccaacagcacatctggaggatcttcaaatgacaacgcctacttcggctacagcaccccctgggggtattttgacttcaacagattccactgccacttctcaccacgtgactggcagcgactcatcaacaacaactggggattccggcctaagcgactcaacttcaagctcttcaacattcaggtcaaagaggttacggacaacaatggagtcaagaccatcgccaataaccttaccagcacggtccaggtcttcacggactcagactatcagctcccgtacgtgctcgggtcggctcacgagggctgcctcccgccgttcccagcggacgttttcatgattcctcagtacgggtatctgacgcttaatgatggaagccaggccgtgggtcgttcgtccttttactgcctggaatatttcccgtcgcaaatgctaagaacgggtaacaacttccagttcagctacgagtttgagaacgtacctttccatagcagctacgctcacagccaaagcctggaccgactaatgaatccactcatcgaccaatacttgtattacttgagtaaaacaattaacggacacgacagcccacacaaaagcggacaaaaccaacagaccttgaagttttcggtagctggtcctagcaacatggctgtccagggaagaaactacatacctggacccagctaccgacaacaacgtgtctcaaccactgtgactcaaaacaacaacagcgaatttgcttggcctggagcttcttcttgggctctcaatggacgtaatagcttgatgaatcctggacctgctatggccagccacaaagaaggagaggaccgtttctttcctttgtctggatctttaatttttggcaaacaaggaactggaagagacaacgtggatgcggacaaagtcatgataaccaacgaagaagaaattaaaactactaacccggtagcaacggagtcctatggacaagtggccacaaaccaccagagtgcccaagcacaggcgcagaccggctgggttcaaaaccaaggaatacttccgggtatggtttggcaggacagagatgtgtacctgcaaggacccatttgggccaaaattcctcacacggacggcaactttcacccttctccgctgatgggagggtttggaatgaagcacccgcctcctcagatcctcatcaaaaacacacctgtacctgcggatcctccaacggccttcaacaaggacaagctgaactctttcatcacccagtattctactggccaagtcagcgtggagatcgagtgggagctgcagaaggaaaacagcaagcgctggaacccggagatccagtacacttccaactattacaagtctaataatgttgaatttgctgttaatactgaaggtgtatatagtgaaccccgccccattggcacgcggtatttaacgaggaacttataa

SEQ ID NO: 985 - protein, 6 aa, synthetic construct
STHASR

SEQ ID NO: 986 - protein, 6 aa, synthetic construct
SQHKSG

SEQ ID NO: 987 - DNA, 1184 bp, synthetic construct
  source 1..1184: mol_type = other DNA
cgtgaggctccggtgcccgtcagtgggcagagcgcacatcgcccacagtccccgagaagttggggggaggggtcggcaattgaaccggtgcctagagaaggtggcgcggggtaaactgggaaagtgatgtcgtgtactggctccgcctttttcccgagggtgggggagaaccgtatataagtgcagtagtcgccgtgaacgttctttttcgcaacgggtttgccgccagaacacaggtaagtgccgtgtgtggttcccgcgggcctggcctctttacgggttatggcccttgcgtgccttgaattacttccacctggctgcagtacgtgattcttgatcccgagcttcgggttggaagtgggtgggagagttcgaggccttgcgcttaaggagccccttcgcctcgtgcttgagttgaggcctggcctgggcgctggggccgccgcgtgcgaatctggtggcaccttcgcgcctgtctcgctgctttcgataagtctctagccatttaaaatttttgatgacctgctgcgacgctttttttctggcaagatagtcttgtaaatgcgggccaagatctgcacactggtatttcggtttttggggccgcgggcggcgacggggcccgtgcgtcccagcgcacatgttcggcgaggcggggcctgcgagcgcggccaccgagaatcggacgggggtagtctcaagctggccggcctgctctggtgcctggcctcgcgccgccgtgtatcgccccgccctgggcggcaaggctggcccggtcggcaccagttgcgtgagcggaaagatggccgcttcccggccctgctgcagggagctcaaaatggaggacgcggcgctcgggagagcgggcgggtgagtcacccacacaaaggaaaagggcctttccgtcctcagccgtcgcttcatgtgactccacggagtaccgggcgccgtccaggcacctcgattagttctcgagcttttggagtacgtcgtctttaggttggggggaggggttttatgcgatggagtttccccacactgagtgggtggagactgaagttaggccagcttggcacttgatgtaattctccttggaatttgccctttttgagtttggatcttggttcattctcaagcctcagacagtggttcaaagtttttttcttccatttcaggtgtcgtga

SEQ ID NO: 988 - DNA, 227 bp, synthetic construct
  source 1..227: mol_type = other DNA
gcccgtcagtgggcagagcgcacatcgcccacagtccccgagaagttggggggaggggtcggcaattgaaccggtgcctagagaaggtggcgcggggtaaactgggaaagtgatgtcgtgtactggctccgcctttttcccgagggtgggggagaaccgtatataagtgcagtagtcgccgtgaacgttctttttcgcaacgggtttgccgccagaacacgcgtaag

SEQ ID NO: 989 - skipped

SEQ ID NO: 990 - DNA, 16 bp, synthetic construct
  source 1..16: mol_type = other DNA
ggtggagaagagcatg

SEQ ID NO: 991 - DNA, 27 bp, synthetic construct
  source 1..27: mol_type = other DNA
gtcatcactgaggtggagaagagcatg

SEQ ID NO: 992-994 - skipped (3 entries)

SEQ ID NO: 995 - DNA, 222 bp, synthetic construct
  source 1..222: mol_type = other DNA
gcccgtcagtgggcagagcgcacatcgcccacagtccccgagaagttggggggaggggtcggcaattgaaccggtgcctagagaaggtggcgcggggtaaactgggaaagtgatgtcgtgtactggctccgcctttttcccgagggtgggggagaaccgtatataagtgcagtagtcgccgtgaacgttctttttcgcaacgggtttgccgccagaacacag

SEQ ID NO: 996 - DNA, 222 bp, synthetic construct
  source 1..222: mol_type = other DNA
gcccgtcagtgggcagagcgcacatcgcccacagtccccgagaagttggggggaggggtcggcaattgaaccggtgcctagagaaggtggcgcggggtaaactgggaaagtgatgtcgtgtactggctccgcctttttcccgagggtgggggagaaccgtatataagtgcagtagtcgccgtgaacgttctttttcgcaacgggtttgccgccagaacacgc

SEQ ID NO: 997 - skipped

SEQ ID NO: 998 - DNA, 229 bp, synthetic construct
  source 1..229: mol_type = other DNA
gtgcccgtcagtgggcagagcgcacatcgcccacagtccccgagaagttggggggaggggtcggcaattgaaccggtgcctagagaaggtggcgcggggtaaactgggaaagtgatgtcgtgtactggctccgcctttttcccgagggtgggggagaaccgtatataagtgcagtagtcgccgtgaacgttctttttcgcaacgggtttgccgccagaacacgcgtaag

SEQ ID NO: 999 - DNA, 235 bp, synthetic construct
  source 1..235: mol_type = other DNA
gctccggtgcccgtcagtgggcagagcgcacatcgcccacagtccccgagaagttggggggaggggtcggcaattgaaccggtgcctagagaaggtggcgcggggtaaactgggaaagtgatgtcgtgtactggctccgcctttttcccgagggtgggggagaaccgtatataagtgcagtagtcgccgtgaacgttctttttcgcaacgggtttgccgccagaacacgcgtaag

SEQ ID NO: 1000 - DNA, 241 bp, synthetic construct
  source 1..241: mol_type = other DNA
cgtgaggctccggtgcccgtcagtgggcagagcgcacatcgcccacagtccccgagaagttggggggaggggtcggcaattgaaccggtgcctagagaaggtggcgcggggtaaactgggaaagtgatgtcgtgtactggctccgcctttttcccgagggtgggggagaaccgtatataagtgcagtagtcgccgtgaacgttctttttcgcaacgggtttgccgccagaacacgcgtaag

SEQ ID NO: 1001 - DNA, 236 bp, synthetic construct
  source 1..236: mol_type = other DNA
cgtgaggctccggtgcccgtcagtgggcagagcgcacatcgcccacagtccccgagaagttggggggaggggtcggcaattgaaccggtgcctagagaaggtggcgcggggtaaactgggaaagtgatgtcgtgtactggctccgcctttttcccgagggtgggggagaaccgtatataagtgcagtagtcgccgtgaacgttctttttcgcaacgggtttgccgccagaacacag

SEQ ID NO: 1002 - DNA, 246 bp, synthetic construct
  source 1..246: mol_type = other DNA
gcatgcgtgaggctccggtgcccgtcagtgggcagagcgcacatcgcccacagtccccgagaagttggggggaggggtcggcaattgaaccggtgcctagagaaggtggcgcggggtaaactgggaaagtgatgtcgtgtactggctccgcctttttcccgagggtgggggagaaccgtatataagtgcagtagtcgccgtgaacgttctttttcgcaacgggtttgccgccagaacacgcgtaag

SEQ ID NO: 1003 - DNA, 241 bp, synthetic construct
  source 1..241: mol_type = other DNA
gcatgcgtgaggctccggtgcccgtcagtgggcagagcgcacatcgcccacagtccccgagaagttggggggaggggtcggcaattgaaccggtgcctagagaaggtggcgcggggtaaactgggaaagtgatgtcgtgtactggctccgcctttttcccgagggtgggggagaaccgtatataagtgcagtagtcgccgtgaacgttctttttcgcaacgggtttgccgccagaacacag

SEQ ID NO: 1004 - DNA, 257 bp, synthetic construct
  source 1..257: mol_type = other DNA
ggtggagaagagcatgcgtgaggctccggtgcccgtcagtgggcagagcgcacatcgcccacagtccccgagaagttggggggaggggtcggcaattgaaccggtgcctagagaaggtggcgcggggtaaactgggaaagtgatgtcgtgtactggctccgcctttttcccgagggtgggggagaaccgtatataagtgcagtagtcgccgtgaacgttctttttcgcaacgggtttgccgccagaacacgcgtaag

SEQ ID NO: 1005 - DNA, 252 bp, synthetic construct
  source 1..252: mol_type = other DNA
ggtggagaagagcatgcgtgaggctccggtgcccgtcagtgggcagagcgcacatcgcccacagtccccgagaagttggggggaggggtcggcaattgaaccggtgcctagagaaggtggcgcggggtaaactgggaaagtgatgtcgtgtactggctccgcctttttcccgagggtgggggagaaccgtatataagtgcagtagtcgccgtgaacgttctttttcgcaacgggtttgccgccagaacacag

SEQ ID NO: 1006 - DNA, 268 bp, synthetic construct
  source 1..268: mol_type = other DNA
gtcatcactgaggtggagaagagcatgcgtgaggctccggtgcccgtcagtgggcagagcgcacatcgcccacagtccccgagaagttggggggaggggtcggcaattgaaccggtgcctagagaaggtggcgcggggtaaactgggaaagtgatgtcgtgtactggctccgcctttttcccgagggtgggggagaaccgtatataagtgcagtagtcgccgtgaacgttctttttcgcaacgggtttgccgccagaacacgcgtaag

SEQ ID NO: 1007 - DNA, 263 bp, synthetic construct
  source 1..263: mol_type = other DNA
gtcatcactgaggtggagaagagcatgcgtgaggctccggtgcccgtcagtgggcagagcgcacatcgcccacagtccccgagaagttggggggaggggtcggcaattgaaccggtgcctagagaaggtggcgcggggtaaactgggaaagtgatgtcgtgtactggctccgcctttttcccgagggtgggggagaaccgtatataagtgcagtagtcgccgtgaacgttctttttcgcaacgggtttgccgccagaacacag

SEQ ID NO: 1008 - protein, 18 aa, synthetic construct
KTINGSGSPHSLLWNQQT

SEQ ID NO: 1009 - protein, 18 aa, synthetic construct
KTINGSGSPHSKAQYYVT

SEQ ID NO: 1010 - protein, 18 aa, synthetic construct
KTINGSGSPHSKLRRQQT

SEQ ID NO: 1011 - protein, 18 aa, synthetic construct
KTINGSGSPHSIWQNQQT

SEQ ID NO: 1012 - protein, 18 aa, synthetic construct
KTINGSSSPHCTAQNQQT

SEQ ID NO: 1013 - protein, 18 aa, synthetic construct
KTINGSGSPHSKAGCGQT

SEQ ID NO: 1014 - protein, 18 aa, synthetic construct
KSMNGSGSPHSRAQNQQT

SEQ ID NO: 1015 - protein, 18 aa, synthetic construct
KTINGSGSPHSKRLRQQT

SEQ ID NO: 1016 - protein, 18 aa, synthetic construct
KTINGSGSPHSLRRNQQT

SEQ ID NO: 1017 - protein, 18 aa, synthetic construct
KTINGSGSPHSRGRNQQT

SEQ ID NO: 1018 - protein, 18 aa, synthetic construct
KTINGSGSPHSEIVNQQT

SEQ ID NO: 1019 - protein, 18 aa, synthetic construct
KTINGSGSPHSSRRNQQT

SEQ ID NO: 1020 - protein, 18 aa, synthetic construct
KTINGSGSPHCLLQNQQT

SEQ ID NO: 1021 - protein, 18 aa, synthetic construct
KTIMRVGSPHSKAQNQQT

SEQ ID NO: 1022 - protein, 18 aa, synthetic construct
KTINGSGSPHSKAFRLQT

SEQ ID NO: 1023 - protein, 18 aa, synthetic construct
KTINGSGSPHCLAQNQQT

SEQ ID NO: 1024 - protein, 18 aa, synthetic construct
KTINGSCSPHRKAQNQQT

SEQ ID NO: 1025 - protein, 18 aa, synthetic construct
KTINGSGSPHFLRQNQQT

SEQ ID NO: 1026 - protein, 18 aa, synthetic construct
KTINGSGSPHSLRFNQQT

SEQ ID NO: 1027 - protein, 18 aa, synthetic construct
KTINGSGSPHSYLRNQQT

SEQ ID NO: 1028 - protein, 18 aa, synthetic construct
KTINGSGSPHCSLQNQQT

SEQ ID NO: 1029 - protein, 18 aa, synthetic construct
KTINGSGSPHVLWQNQQT

SEQ ID NO: 1030 - protein, 18 aa, synthetic construct
KTINGSGSPHSKWLLQQT

SEQ ID NO: 1031 - protein, 18 aa, synthetic construct
KTINGSGSPHSLWSNQQT

SEQ ID NO: 1032 - protein, 18 aa, synthetic construct
KTINGSGSPHSKRRLQQT

SEQ ID NO: 1033 - protein, 18 aa, synthetic construct
KTINGSGSPHSVYLNQQT

SEQ ID NO: 1034 - protein, 18 aa, synthetic construct
KTINGSGSPHSLWLNQQT

SEQ ID NO: 1035 - protein, 18 aa, synthetic construct
KTINGSGSPHSKAQRKLT

SEQ ID NO: 1036 - protein, 18 aa, synthetic construct
KTINGSGSPHSKALRRQT

SEQ ID NO: 1037 - protein, 18 aa, synthetic construct
KTINGSGSPHSKAQRLRT

SEQ ID NO: 1038 - protein, 18 aa, synthetic construct
KYLSGSGSPHSKAQNQQT

SEQ ID NO: 1039 - protein, 18 aa, synthetic construct
KTINGSGSPHSKAQRRLT

SEQ ID NO: 1040 - protein, 18 aa, synthetic construct
KTINGSGSPHSKARRQQT

SEQ ID NO: 1041 - protein, 18 aa, synthetic construct
KTINGSGSPHSKARRLQT

SEQ ID NO: 1042 - protein, 18 aa, synthetic construct
KTINGSGSPHSKSRRQQT

SEQ ID NO: 1043 - protein, 18 aa, synthetic construct
KTINGLLSPHWKAQNQQT

SEQ ID NO: 1044 - protein, 18 aa, synthetic construct
KTINGSGSPHSKARLRQT

SEQ ID NO: 1045 - protein, 18 aa, synthetic construct
KTINGSGSPHSKASKRQT

SEQ ID NO: 1046 - protein, 18 aa, synthetic construct
KTINGSGSPHVRRQNQQT

SEQ ID NO: 1047 - protein, 18 aa, synthetic construct
KTINGSGSPHSKAQLYRT

SEQ ID NO: 1048 - protein, 18 aa, synthetic construct
KGLSGSGSPHSKAQNQQT

SEQ ID NO: 1049 - protein, 18 aa, synthetic construct
KTINGSGSPHSLFRNQQT

SEQ ID NO: 1050 - protein, 18 aa, synthetic construct
KTINGSGSPHSKAQLTVT

SEQ ID NO: 1051 - protein, 18 aa, synthetic construct
KTINGSRSPHTRAQNQQT

SEQ ID NO: 1052 - protein, 18 aa, synthetic construct
KTINGSGSPHSKAKLRQT

SEQ ID NO: 1053 - protein, 18 aa, synthetic construct
KTINGSGSPHSKLIRQQT

SEQ ID NO: 1054 - protein, 18 aa, synthetic construct
KTINGSGSPHSKALRFQT

SEQ ID NO: 1055 - protein, 18 aa, synthetic construct
KTINGSGSPHSKRTFQQT

SEQ ID NO: 1056 - protein, 18 aa, synthetic construct
KTINGSGSPHSKAQKRLT

SEQ ID NO: 1057 - protein, 18 aa, synthetic construct
KTINGSGSPHLWSQNQQT

SEQ ID NO: 1058 - protein, 18 aa, synthetic construct
KTINGSGSPHLLWQNQQT

SEQ ID NO: 1059 - protein, 18 aa, synthetic construct
KTINGSGSPHSRLRNQQT

SEQ ID NO: 1060 - protein, 18 aa, synthetic construct
KTINGSGSPHSKRAAQQT

SEQ ID NO: 1061 - protein, 18 aa, synthetic construct
KTINGSGSPHSKRSWQQT

SEQ ID NO: 1062 - protein, 18 aa, synthetic construct
KTINGSGSPHSKAQLRRT

SEQ ID NO: 1063 - protein, 18 aa, synthetic construct
KTINGSGSPHYLVQNQQT

SEQ ID NO: 1064 - protein, 18 aa, synthetic construct
KTINGSGSPHSKLFRQQT

SEQ ID NO: 1065 - protein, 18 aa, synthetic construct
KTINGSGSPHSKRAMQQT

SEQ ID NO: 1066 - protein, 18 aa, synthetic construct
KTINGSGSPHSKTLRQQT

SEQ ID NO: 1067 - protein, 18 aa, synthetic construct
KTINGSGSPHSRSRNQQT

SEQ ID NO: 1068 - protein, 18 aa, synthetic construct
KTINGSGSPHRRRQNQQT

SEQ ID NO: 1069 - protein, 18 aa, synthetic construct
KTINGSGSPHSKTCLQQT

SEQ ID NO: 1070 - protein, 18 aa, synthetic construct
KTINGSGSPHSKSRWQQT

SEQ ID NO: 1071 - protein, 18 aa, synthetic construct
KTINGSGSPHRFRQNQQT

SEQ ID NO: 1072 - protein, 18 aa, synthetic construct
KTINGLRSPHRKAQNQQT

SEQ ID NO: 1073 - protein, 18 aa, synthetic construct
KTRSRSGSPHSKAQNQQT

SEQ ID NO: 1074 - protein, 18 aa, synthetic construct
KTINGSGSPHSKAQLVVT

SEQ ID NO: 1075 - protein, 18 aa, synthetic construct
KTINGSGSPHSRKLNQQT

SEQ ID NO: 1076 - protein, 18 aa, synthetic construct
KTINGSGSPHSLLCNQQT

SEQ ID NO: 1077 - protein, 18 aa, synthetic construct
KTINGKRSPHSKAQNQQT

SEQ ID NO: 1078 - protein, 18 aa, synthetic construct
KTINGSRSPHLFAQNQQT

SEQ ID NO: 1079 - protein, 18 aa, synthetic construct
KSINGSGSPHSKAHDQQT

SEQ ID NO: 1080 - protein, 18 aa, synthetic construct
KTINGSGSPHSKAQRSRT

SEQ ID NO: 1081 - protein, 18 aa, synthetic construct
KTINGSGSPHSTWLNQQT

SEQ ID NO: 1082 - protein, 18 aa, synthetic construct
KTINGSGSPHSKASRRQT

SEQ ID NO: 1083 - protein, 18 aa, synthetic construct
KTINGSGSPHSKRSMQQT

SEQ ID NO: 1084 - protein, 18 aa, synthetic construct
KTINGSGSPHSCLQNQQT

SEQ ID NO: 1085 - protein, 18 aa, synthetic construct
KTINGSGSPHSKRLWQQT

SEQ ID NO: 1086 - protein, 18 aa, synthetic construct
KTINGSGSPHSWLSNQQT

SEQ ID NO: 1087 - protein, 18 aa, synthetic construct
KTINGSGSPHLRRQNQQT

SEQ ID NO: 1088 - protein, 18 aa, synthetic construct
KTINGSGSPHSKARRSQT

SEQ ID NO: 1089 - protein, 18 aa, synthetic construct
KTINGSGSPHSKHLRQQT

SEQ ID NO: 1090 - protein, 18 aa, synthetic construct
KTINGSGSPHSCSQNQQT

SEQ ID NO: 1091 - protein, 18 aa, synthetic construct
KTINGSGSPHSKSFRQQT

SEQ ID NO: 1092 - protein, 18 aa, synthetic construct
KTINGSGSPHLCLQNQQT

SEQ ID NO: 1093 - protein, 18 aa, synthetic construct
KTINGSGSPHSKAQTSRT

SEQ ID NO: 1094 - protein, 18 aa, synthetic construct
KTINGSGSPHSLCSNQQT

SEQ ID NO: 1095 - protein, 18 aa, synthetic construct
KTINGSRSPHLRAQNQQT

SEQ ID NO: 1096 - protein, 18 aa, synthetic construct
KTINGSGSPHSKAQVSKT

SEQ ID NO: 1097 - protein, 18 aa, synthetic construct
KTINGSGSPHSKAQRHVT

SEQ ID NO: 1098 - protein, 18 aa, synthetic construct
KTINGSSSPHLCAQNQQT

SEQ ID NO: 1099 - protein, 18 aa, synthetic construct
KTINGSGSPHSFLRNQQT

SEQ ID NO: 1100 - protein, 18 aa, synthetic construct
KTINGSGSPHSFVLNQQT

SEQ ID NO: 1101 - protein, 18 aa, synthetic construct
KTINGSGSPHSKMRAQQT

SEQ ID NO: 1102 - protein, 18 aa, synthetic construct
KTINGSGSPHRPRQNQQT

SEQ ID NO: 1103 - protein, 18 aa, synthetic construct
KTINGSGSPHSKCLLQQT

SEQ ID NO: 1104 - protein, 18 aa, synthetic construct
KTINGSGSPHSKAQSRRT

SEQ ID NO: 1105 - protein, 18 aa, synthetic construct
KTINGSGSPHSRWQNQQT

SEQ ID NO: 1106 - protein, 18 aa, synthetic construct
KYSVGSGSPHSKAQNQQT

SEQ ID NO: 1107 - protein, 18 aa, synthetic construct
KTINGSGSPHSKRFLQQT

SEQ ID NO: 1108 - protein, 18 aa, synthetic construct
KTINGSGSPHSLFLNQQT

SEQ ID NO: 1109 - protein, 18 aa, synthetic construct
KTINGSGSPHSKAYLRQT

SEQ ID NO: 1110 - protein, 18 aa, synthetic construct
KTINGSGSPHSKRNGQQT

SEQ ID NO: 1111 - protein, 18 aa, synthetic construct
KTINGSGSPHTRRQNQQT

SEQ ID NO: 1112 - protein, 18 aa, synthetic construct
KTINGSGSPHSKPRLQQT

SEQ ID NO: 1113 - protein, 18 aa, synthetic construct
KTINFLRSPHSKAQNQQT

SEQ ID NO: 1114 - protein, 18 aa, synthetic construct
KTINGSGSPHLLCQNQQT

SEQ ID NO: 1115 - protein, 18 aa, synthetic construct
KTINGSGSPHSKARIVQT

SEQ ID NO: 1116 - protein, 18 aa, synthetic construct
KTINGSKSPHFKAQNQQT

SEQ ID NO: 1117 - protein, 18 aa, synthetic construct
KTINGSGSPHSKAQIRLT

SEQ ID NO: 1118 - protein, 18 aa, synthetic construct
KTINGSSSPHWVAQNQQT

SEQ ID NO: 1119 - protein, 18 aa, synthetic construct
KTINGSGSPHSKATRRQT

SEQ ID NO: 1120 - protein, 18 aa, synthetic construct
KTINGSLSPHSCAQNQQT

SEQ ID NO: 1121 - protein, 18 aa, synthetic construct
KTINGSGSPHSLYLNQQT

SEQ ID NO: 1122 - protein, 18 aa, synthetic construct
KTINGSGSPHSKVGRQQT

SEQ ID NO: 1123 - protein, 18 aa, synthetic construct
KTINGSGSPHSRRLNQQT

SEQ ID NO: 1124 - protein, 18 aa, synthetic construct
KTINGSGSPHSKAQHSRT

SEQ ID NO: 1125 - protein, 18 aa, synthetic construct
KTINGSGSPHSKAFPRQT

SEQ ID NO: 1126 - protein, 18 aa, synthetic construct
KTINGSPSPHRRAQNQQT

SEQ ID NO: 1127 - protein, 18 aa, synthetic construct
KTINGSGSPHSKRNLQQT

SEQ ID NO: 1128 - protein, 18 aa, synthetic construct
KTINGSGSPHSKPTRQQT

SEQ ID NO: 1129 - protein, 18 aa, synthetic construct
KTINGSGSPHSKLWLQQT

SEQ ID NO: 1130 - protein, 18 aa, synthetic construct
KTINGSGSPHWLAQNQQT

SEQ ID NO: 1131 - protein, 18 aa, synthetic construct
KTINGSGSPHRTRQNQQT

SEQ ID NO: 1132 - protein, 18 aa, synthetic construct
KTINGSGSPHSKLNKQQT

SEQ ID NO: 1133 - protein, 18 aa, synthetic construct
KTINGSGSPHSSLWNQQT

SEQ ID NO: 1134 - protein, 18 aa, synthetic construct
KTINGSGSPHSKAQITLT

SEQ ID NO: 1135 - protein, 18 aa, synthetic construct
KTINGSGSPHSKFLFQQT

SEQ ID NO: 1136 - protein, 18 aa, synthetic construct
KTINGSGSPHSKRTPQQT

SEQ ID NO: 1137 - protein, 18 aa, synthetic construct
KTINGSGSPHSKAQNSRR

SEQ ID NO: 1138 - protein, 18 aa, synthetic construct
KTINGSGSPHSRLKNQQT

SEQ ID NO: 1139 - protein, 18 aa, synthetic construct
KTINGSGSPHSCLLNQQT

SEQ ID NO: 1140 - protein, 18 aa, synthetic construct
KTINGSGSPHTLYQNQQT

SEQ ID NO: 1141 - protein, 18 aa, synthetic construct
KTINGSGSPHSKYPSQQT

SEQ ID NO: 1142 - protein, 18 aa, synthetic construct
KTINGSGSPHSKLRNQQT

SEQ ID NO: 1143 - protein, 18 aa, synthetic construct
KTINGSGSPHLNWQNQQT

SEQ ID NO: 1144 - protein, 18 aa, synthetic construct
KTINGVVSPHRKAQNQQT

SEQ ID NO: 1145 - protein, 18 aa, synthetic construct
KTINGSGSPHSYRPNQQT

SEQ ID NO: 1146 - protein, 18 aa, synthetic construct
KTINGSTSPHRRAQNQQT

SEQ ID NO: 1147 - protein, 18 aa, synthetic construct
KTINGSCSPHPLAQNQQT

SEQ ID NO: 1148 - protein, 18 aa, synthetic construct
KTINGSGSPHSKAFARQT

SEQ ID NO: 1149 - protein, 18 aa, synthetic construct
KTINGSGSPHSKALRYQT

SEQ ID NO: 1150 - protein, 18 aa, synthetic construct
KTINGSKSPHRLAQNQQT

SEQ ID NO: 1151 - protein, 18 aa, synthetic construct
KTINMRVSPHSKAQNQQT

SEQ ID NO: 1152 - protein, 18 aa, synthetic construct
KTINGSGSPHMYLQNQQT

SEQ ID NO: 1153 - protein, 18 aa, synthetic construct
KTINGSGSPHSKLARQQT

SEQ ID NO: 1154 - protein, 18 aa, synthetic construct
KTINGSGSPHSKARPYQT

SEQ ID NO: 1155 - protein, 18 aa, synthetic construct
KTINGSGSPHSKRVPQQT

SEQ ID NO: 1156 - protein, 18 aa, synthetic construct
KTINGSGSPHLSWQNQQT

SEQ ID NO: 1157 - protein, 18 aa, synthetic construct
KTINGRSSPHGKAQNQQT

SEQ ID NO: 1158 - protein, 18 aa, synthetic construct
KTINGSGSPHLWTQNQQT

SEQ ID NO: 1159 - protein, 18 aa, synthetic construct
KTINGLLSPHRKAQNQQT

SEQ ID NO: 1160 - protein, 18 aa, synthetic construct
KTINGSGSPHRLRQNQQT

SEQ ID NO: 1161 - protein, 18 aa, synthetic construct
KTINGSCSPHSGAQNQQT

SEQ ID NO: 1162 - protein, 18 aa, synthetic construct
KTINGSGSPHSKAQRRST

SEQ ID NO: 1163 - protein, 18 aa, synthetic construct
KTINGSGSPHSKLCSQQT

SEQ ID NO: 1164 - protein, 18 aa, synthetic construct
KTINGSGSPHSKAQLLKT

SEQ ID NO: 1165 - protein, 18 aa, synthetic construct
KTINGRKSPHSKAQNQQT

SEQ ID NO: 1166 - protein, 18 aa, synthetic construct
KTINGSGSPHLLYQNQQT

SEQ ID NO: 1167 - protein, 18 aa, synthetic construct
KTINGSGSPHSKLLRQQT

SEQ ID NO: 1168 - protein, 18 aa, synthetic construct
KTINGSGSPHSLRHNQQT

SEQ ID NO: 1169 - protein, 18 aa, synthetic construct
KTINGSGSPHSSKRNQQT

SEQ ID NO: 1170 - protein, 18 aa, synthetic construct
KTINGSGSPHSKARSRQT

SEQ ID NO: 1171 - protein, 18 aa, synthetic construct
KTINGRSSPHRKAQNQQT

SEQ ID NO: 1172 - protein, 18 aa, synthetic construct
KTINGSKSPHRTAQNQQT

SEQ ID NO: 1173 - protein, 18 aa, synthetic construct
KTINGMRSPHVKAQNQQT

SEQ ID NO: 1174 - protein, 18 aa, synthetic construct
KTINGSGSPHSKRMSQQT

SEQ ID NO: 1175 - protein, 18 aa, synthetic construct
KTINGSGSPHSKVPKQQT

SEQ ID NO: 1176 - protein, 18 aa, synthetic construct
KTINLIRSPHSKAQNQQT

SEQ ID NO: 1177 - protein, 18 aa, synthetic construct
KTINGSGSPHPFLQNQQT

SEQ ID NO: 1178 - protein, 18 aa, synthetic construct
KTINGSGSPHSKARLWQT

SEQ ID NO: 1179 - protein, 18 aa, synthetic construct
KTINGSGSPHSRTRNQQT

SEQ ID NO: 1180 - protein, 18 aa, synthetic construct
KTINGSGSPHSKRSNQQT

SEQ ID NO: 1181 - protein, 18 aa, synthetic construct
KTINGSLSPHSWAQNQQT

SEQ ID NO: 1182 - protein, 18 aa, synthetic construct
KTINGSRSPHYKAQNQQT

SEQ ID NO: 1183 - protein, 18 aa, synthetic construct
KTINRHSSPHSKAQNQQT

SEQ ID NO: 1184 - protein, 18 aa, synthetic construct
KTINGSGSPHSKRRNQQT

SEQ ID NO: 1185 - protein, 18 aa, synthetic construct
KTINGSGSPHSKAKHLQT

SEQ ID NO: 1186 - protein, 18 aa, synthetic construct
KTINGSGSPHSKRTYQQT

SEQ ID NO: 1187 - protein, 18 aa, synthetic construct
KTINGVLSPHRKAQNQQT

SEQ ID NO: 1188 - protein, 18 aa, synthetic construct
KTINGSGSPHSFITNQQT

SEQ ID NO: 1189 - protein, 18 aa, synthetic construct
KTINGSGSPHSTRLNQQT

SEQ ID NO: 1190 - protein, 18 aa, synthetic construct
KTINGSGSPHSKRTSQQT

SEQ ID NO: 1191 - protein, 18 aa, synthetic construct
KTINGSGSPHSRRSNQQT

SEQ ID NO: 1192 - protein, 18 aa, synthetic construct
KTINGHLSPHRKAQNQQT

SEQ ID NO: 1193 - protein, 18 aa, synthetic construct
KTINGSGSPHSKAQFSRT

SEQ ID NO: 1194 - protein, 18 aa, synthetic construct
KTINGSGSPHSKAQTFRT

SEQ ID NO: 1195 - protein, 18 aa, synthetic construct
KTINGSGSPHSKPLRQQT

SEQ ID NO: 1196 - protein, 18 aa, synthetic construct
KTINGSGSPHSKASCRQT

SEQ ID NO: 1197 - protein, 18 aa, synthetic construct
KTINGSGSPHSKILWQQT

SEQ ID NO: 1198 - protein, 18 aa, synthetic construct
KTINGSGSPHSKALKRQT

SEQ ID NO: 1199 - protein, 18 aa, synthetic construct
KTINGSGSPHSKAHRSQT

SEQ ID NO: 1200 - protein, 18 aa, synthetic construct
KTINGSGSPHSMLYNQQT

SEQ ID NO: 1201 - protein, 18 aa, synthetic construct
KTINGSGSPHSKCTLQQT

SEQ ID NO: 1202 - protein, 18 aa, synthetic construct
KTINGSGSPHSKAQNRMR

SEQ ID NO: 1203 - protein, 18 aa, synthetic construct
KTINGSGSPHSKLVRQQT

SEQ ID NO: 1204 - protein, 18 aa, synthetic construct
KTINGSGSPHSKRILQQT

SEQ ID NO: 1205 - protein, 18 aa, synthetic construct
KTINGSGSPHSKAQWLRT

SEQ ID NO: 1206 - protein, 18 aa, synthetic construct
KTINGSGSPHSLTCNQQT

SEQ ID NO: 1207 - protein, 18 aa, synthetic construct
KTINGIRSPHTKAQNQQT

SEQ ID NO: 1208 - protein, 18 aa, synthetic construct
KTINGSGSPHSKAQRWLT

SEQ ID NO: 1209 - protein, 18 aa, synthetic construct
KTINGSGSPHSKAQLSIT

SEQ ID NO: 1210 - protein, 18 aa, synthetic construct
KTINGSGSPHIYRQNQQT

SEQ ID NO: 1211 - protein, 18 aa, synthetic construct
KTINGSGSPHSLRSNQQT

SEQ ID NO: 1212 - protein, 18 aa, synthetic construct
KTINGSGSPHSKVKPQQT

SEQ ID NO: 1213 - protein, 18 aa, synthetic construct
KTINGSGSPHSKATRHQT

SEQ ID NO: 1214 - protein, 18 aa, synthetic construct
KTINGSLSPHLCAQNQQT

SEQ ID NO: 1215 - protein, 18 aa, synthetic construct
KTINGSGSPHSKACASQT

SEQ ID NO: 1216 - protein, 18 aa, synthetic construct
KWSPGSGSPHSKAQNQQT

SEQ ID NO: 1217 - protein, 18 aa, synthetic construct
KTINGYLSPHRKAQNQQT

SEQ ID NO: 1218 - protein, 18 aa, synthetic construct
KTINGSGSPHSKVIRQQT

SEQ ID NO: 1219 - protein, 18 aa, synthetic construct
KTINGSGSPHFLLQNQQT

SEQ ID NO: 1220 - protein, 18 aa, synthetic construct
KTINGSGSPHSKARSKQT

SEQ ID NO: 1221 - protein, 18 aa, synthetic construct
KTINGVPSPHWKAQNQQT

SEQ ID NO: 1222 - protein, 18 aa, synthetic construct
KTINGSGSPHSKATRNQT

SEQ ID NO: 1223 - protein, 18 aa, synthetic construct
KTINGSGSPHSKACSAQT

SEQ ID NO: 1224 - protein, 18 aa, synthetic construct
KTINGSGSPHSKARYVQT

SEQ ID NO: 1225 - protein, 18 aa, synthetic construct
KTINGSRSPHARAQNQQT

SEQ ID NO: 1226 - protein, 18 aa, synthetic construct
KTINGSGSPHSKAQHLRT

SEQ ID NO: 1227 - protein, 18 aa, synthetic construct
KTINGSGSPHSKAKSRQT

SEQ ID NO: 1228 - protein, 18 aa, synthetic construct
KTINGSGSPHSKIGRQQT

SEQ ID NO: 1229 - protein, 18 aa, synthetic construct
KTINGLASPHRKAQNQQT

SEQ ID NO: 1230 - protein, 18 aa, synthetic construct
KTINGSGSPHSKARTRQT

SEQ ID NO: 1231 - protein, 18 aa, synthetic construct
KTINGSGSPHSKSIRQQT

SEQ ID NO: 1232 - protein, 18 aa, synthetic construct
KTINGSGSPHSKRLYQQT

SEQ ID NO: 1233 - protein, 18 aa, synthetic construct
KTINGLPSPHRKAQNQQT

SEQ ID NO: 1234 - protein, 18 aa, synthetic construct
KTINGSLSPHRRAQNQQT

SEQ ID NO: 1235 - protein, 18 aa, synthetic construct
KTINGKTSPHGKAQNQQT

SEQ ID NO: 1236 - protein, 18 aa, synthetic construct
KTINGSRSPHRLAQNQQT

SEQ ID NO: 1237 - protein, 18 aa, synthetic construct
KTINGSGSPHSLTWNQQT

SEQ ID NO: 1238 - protein, 18 aa, synthetic construct
KTINGSKSPHRKAQNQQT

SEQ ID NO: 1239 - protein, 18 aa, synthetic construct
KTINGSGSPHSKAQLRKT

SEQ ID NO: 1240 - protein, 18 aa, synthetic construct
KTINGSGSPHSKSRHQQT

SEQ ID NO: 1241 - protein, 18 aa, synthetic construct
KTINRRLSPHSKAQNQQT

SEQ ID NO: 1242 - protein, 18 aa, synthetic construct
KTINGSGSPHSRRVNQQT

SEQ ID NO: 1243 - protein, 18 aa, synthetic construct
KTINGSGSPHSHWQNQQT

SEQ ID NO: 1244 - protein, 18 aa, synthetic construct
KTTHCSGSPHSKAQNQQT

SEQ ID NO: 1245 - protein, 18 aa, synthetic construct
KTINGSGSPHSWLQNQQT

SEQ ID NO: 1246 - protein, 18 aa, synthetic construct
KTINGSTSPHYLAQNQQT

SEQ ID NO: 1247 - protein, 18 aa, synthetic construct
KTINGLTSPHRKAQNQQT

SEQ ID NO: 1248 - protein, 18 aa, synthetic construct
KTINGSGSPHSKRLLQQT

SEQ ID NO: 1249 - protein, 18 aa, synthetic construct
KTINGSGSPHSKLCVQQT

SEQ ID NO: 1250 - protein, 18 aa, synthetic construct
KTINGFLSPHRKAQNQQT

SEQ ID NO: 1251 - protein, 18 aa, synthetic construct
KTINGSGSPHSKMRPQQT

SEQ ID NO: 1252 - protein, 18 aa, synthetic construct
KTINGSGSPHSKQTRQQT

SEQ ID NO: 1253 - protein, 18 aa, synthetic construct
KTINGSGSPHSYLINQQT

SEQ ID NO: 1254 - protein, 18 aa, synthetic construct
KTINGSGSPHSKALRSQT

SEQ ID NO: 1255 - protein, 18 aa, synthetic construct
KTINGMLSPHRKAQNQQT

SEQ ID NO: 1256 - protein, 18 aa, synthetic construct
KTINGSGSPHSKCLTQQT

SEQ ID NO: 1257 - protein, 18 aa, synthetic construct
KTINGSGSPHSKAQLTLT

SEQ ID NO: 1258 - protein, 18 aa, synthetic construct
KTINGHSSPHRKAQNQQT

SEQ ID NO: 1259 - protein, 18 aa, synthetic construct
KTINGSGSPHLTWQNQQT

SEQ ID NO: 1260 - protein, 18 aa, synthetic construct
KTINGSGSPHSKAQYCLT

SEQ ID NO: 1261 - protein, 18 aa, synthetic construct
KTINGSGSPHSFLVNQQT

SEQ ID NO: 1262 - protein, 18 aa, synthetic construct
KTINMSRSPHSKAQNQQT

SEQ ID NO: 1263 - protein, 18 aa, synthetic construct
KTINGSGSPHSKAQLHRT

SEQ ID NO: 1264 - protein, 18 aa, synthetic construct
KTINGSGSPHLYMQNQQT

SEQ ID NO: 1265 - protein, 18 aa, synthetic construct
KTINGSRSPHRRAQNQQT

SEQ ID NO: 1266 - protein, 18 aa, synthetic construct
KTINGSGSPHSKAQNRRS

SEQ ID NO: 1267 - protein, 18 aa, synthetic construct
KTINLRFSPHSKAQNQQT

SEQ ID NO: 1268 - protein, 18 aa, synthetic construct
KTINGSGSPHSKAQRLWT

SEQ ID NO: 1269 - protein, 18 aa, synthetic construct
KTINGSGSPHSKGRAQQT

SEQ ID NO: 1270 - protein, 18 aa, synthetic construct
KTINGSGSPHSLSCNQQT

SEQ ID NO: 1271 - protein, 18 aa, synthetic construct
KTINGLVSPHCKAQNQQT

SEQ ID NO: 1272 - protein, 18 aa, synthetic construct
KTINGSSSPHLWAQNQQT

SEQ ID NO: 1273 - protein, 18 aa, synthetic construct
KTINGSGSPHSKAHRLQT

SEQ ID NO: 1274 - protein, 18 aa, synthetic construct
KTINGSGSPHPYAQNQQT

SEQ ID NO: 1275 - protein, 18 aa, synthetic construct
KTINGSGSPHSTRPNQQT

SEQ ID NO: 1276 - protein, 18 aa, synthetic construct
KTINGRSSPHPKAQNQQT

SEQ ID NO: 1277 - protein, 18 aa, synthetic construct
KTINGSGSPHSKAQSWRT

SEQ ID NO: 1278 - protein, 18 aa, synthetic construct
KTINGQRSPHVKAQNQQT

SEQ ID NO: 1279 - protein, 18 aa, synthetic construct
KTINGSGSPHSKAQFVRT

SEQ ID NO: 1280 - protein, 18 aa, synthetic construct
KTINGSGSPHSKCLNQQT

SEQ ID NO: 1281 - protein, 18 aa, synthetic construct
KTINGSGSPHSSLCNQQT

SEQ ID NO: 1282 - protein, 18 aa, synthetic construct
KTINGQRSPHSKAQNQQT

SEQ ID NO: 1283 - protein, 18 aa, synthetic construct
KTINGSGSPHSLSWNQQT

SEQ ID NO: 1284 - protein, 18 aa, synthetic construct
KTINGSGSPHSSRKNQQT

SEQ ID NO: 1285 - protein, 18 aa, synthetic construct
KTINGSGSPHSKRTLQQT

SEQ ID NO: 1286 - protein, 18 aa, synthetic construct
KTINGSLSPHCLAQNQQT

SEQ ID NO: 1287 - protein, 18 aa, synthetic construct
KTINGSGSPHSKAQSSRT

SEQ ID NO: 1288 - protein, 18 aa, synthetic construct
KTINGSGSPHLKRQNQQT

SEQ ID NO: 1289 - protein, 18 aa, synthetic construct
KTINGSGSPHSKARMGQT

SEQ ID NO: 1290 - protein, 18 aa, synthetic construct
KTINGSGSPHSKAQVKLT

SEQ ID NO: 1291 - protein, 18 aa, synthetic construct
KTINGSGSPHSKLPRQQT

SEQ ID NO: 1292 - protein, 18 aa, synthetic construct
KTINGSGSPHSKLCLQQT

SEQ ID NO: 1293 - protein, 18 aa, synthetic construct
KTINGSGSPHSPLWNQQT

SEQ ID NO: 1294 - protein, 18 aa, synthetic construct
KTINGSVSPHSWAQNQQT

SEQ ID NO: 1295 - protein, 18 aa, synthetic construct
KTIRSKGSPHSKAQNQQT

SEQ ID NO: 1296 - protein, 18 aa, synthetic construct
KTINGSRSPHSWAQNQQT

SEQ ID NO: 1297 - protein, 18 aa, synthetic construct
KTINGSGSPHSKILRQQT

SEQ ID NO: 1298 - protein, 18 aa, synthetic construct
KTINGRQSPHVKAQNQQT

SEQ ID NO: 1299 - protein, 18 aa, synthetic construct
KTINGSGSPHSKAQSIKT

SEQ ID NO: 1300 - protein, 18 aa, synthetic construct
KTINGSGSPHSKAQASKT

SEQ ID NO: 1301 - protein, 18 aa, synthetic construct
KTINGSGSPHSRLFNQQT

SEQ ID NO: 1302 - protein, 18 aa, synthetic construct
KTINGSGSPHIYLQNQQT

SEQ ID NO: 1303 - protein, 18 aa, synthetic construct
KTINGSGSPHSRVRNQQT

SEQ ID NO: 1304 - protein, 18 aa, synthetic construct
KTINGSGSPHSKAVRAQT

SEQ ID NO: 1305 - protein, 18 aa, synthetic construct
KTINGSGSPHSKPARQQT

SEQ ID NO: 1306 - protein, 18 aa, synthetic construct
KTINGSGSPHSRYSNQQT

SEQ ID NO: 1307 - protein, 18 aa, synthetic construct
KTINGSRSPHRSAQNQQT

SEQ ID NO: 1308 - protein, 18 aa, synthetic construct
KTINGSLSPHIYAQNQQT

SEQ ID NO: 1309 - protein, 18 aa, synthetic construct
KTINGSGSPHSKPVRQQT

SEQ ID NO: 1310 - protein, 18 aa, synthetic construct
KTINGMRSPHGKAQNQQT

SEQ ID NO: 1311 - protein, 18 aa, synthetic construct
KTINGSGSPHSKARITQT

SEQ ID NO: 1312 - protein, 18 aa, synthetic construct
KTINGSGSPHSWSLNQQT

SEQ ID NO: 1313 - protein, 18 aa, synthetic construct
KTINTSRSPHSKAQNQQT

SEQ ID NO: 1314 - protein, 18 aa, synthetic construct
KTINGSGSPHSKAFTRQT

SEQ ID NO: 1315 - protein, 18 aa, synthetic construct
KTINGSGSPHSKAVRNQT

SEQ ID NO: 1316 - protein, 18 aa, synthetic construct
KTINGSGSPHSKAQTNRT

SEQ ID NO: 1317 - protein, 18 aa, synthetic construct
KTINGSGSPHSKANRMQT

SEQ ID NO: 1318 - protein, 18 aa, synthetic construct
KTINGSGSPHSKAQLVLT

SEQ ID NO: 1319 - protein, 18 aa, synthetic construct
KTINGSGSPHSKATRQQT

SEQ ID NO: 1320 - protein, 18 aa, synthetic construct
KTINGSGSPHSKARGTQT

SEQ ID NO: 1321 - protein, 18 aa, synthetic construct
KTINGSGSPHSKAQWSVT

SEQ ID NO: 1322 - protein, 18 aa, synthetic construct
KTINGSGSPHSKAWLIQT

SEQ ID NO: 1323 - protein, 18 aa, synthetic construct
KTINGSGSPHSKAFRPQT

SEQ ID NO: 1324 - protein, 18 aa, synthetic construct
KTINGSGSPHRRSQNQQT

SEQ ID NO: 1325 - protein, 18 aa, synthetic construct
KTINGSGSPHSKGIRQQT

SEQ ID NO: 1326 - protein, 18 aa, synthetic construct
KTINGSGSPHCTLQNQQT

SEQ ID NO: 1327 - protein, 18 aa, synthetic construct
KPLPGSGSPHSKAQNQQT

SEQ ID NO: 1328 - protein, 18 aa, synthetic construct
KTINGSGSPHLVCQNQQT

SEQ ID NO: 1329 - protein, 18 aa, synthetic construct
KTINGSGSPHSKARGYQT

SEQ ID NO: 1330 - protein, 18 aa, synthetic construct
KTINGRISPHGKAQNQQT

SEQ ID NO: 1331 - protein, 18 aa, synthetic construct
KTINGSSSPHWLAQNQQT

SEQ ID NO: 1332 - protein, 18 aa, synthetic construct
KTINGSGSPHSKARMAQT

SEQ ID NO: 1333 - protein, 18 aa, synthetic construct
KPLDGSGSPHSKAQNQQT

SEQ ID NO: 1334 - protein, 18 aa, synthetic construct
KPLRGSGSPHSKAQNQQT

SEQ ID NO: 1335 - protein, 18 aa, synthetic construct
KTINGSGSPHSKAQNAKL

SEQ ID NO: 1336 - protein, 18 aa, synthetic construct
KTINGSGSPHSKLSKQQT

SEQ ID NO: 1337 - protein, 18 aa, synthetic construct
KTINGSGSPHSKARNGQT

SEQ ID NO: 1338 - protein, 18 aa, synthetic construct
KTINGSGSPHSKAQRRQT

SEQ ID NO: 1339 - protein, 18 aa, synthetic construct
KTINGSGSPHSKWPGQQT

SEQ ID NO: 1340 - protein, 18 aa, synthetic construct
KTINGSGSPHAFLQNQQT

SEQ ID NO: 1341 - protein, 18 aa, synthetic construct
KTINGILSPHRKAQNQQT

SEQ ID NO: 1342 - protein, 18 aa, synthetic construct
KTINGSGSPHSWGSNQQT

SEQ ID NO: 1343 - protein, 18 aa, synthetic construct
KTINGSGSPHSSCLNQQT

SEQ ID NO: 1344 - protein, 18 aa, synthetic construct
KTINGSGSPHSKAQSVKT

SEQ ID NO: 1345 - protein, 18 aa, synthetic construct
KTINGSGSPHSLRYNQQT

SEQ ID NO: 1346 - protein, 18 aa, synthetic construct
KTINGSGSPHSKARKLQT

SEQ ID NO: 1347 - protein, 18 aa, synthetic construct
KHRSGSGSPHSKAQNQQT

SEQ ID NO: 1348 - protein, 18 aa, synthetic construct
KTINGSGSPHSKWSLQQT

SEQ ID NO: 1349 - protein, 18 aa, synthetic construct
KTINGSGSPHSKAQTMRT

SEQ ID NO: 1350 - protein, 18 aa, synthetic construct
KTINGSGSPHSKTIRQQT

SEQ ID NO: 1351 - protein, 18 aa, synthetic construct
KTINGKLSPHMKAQNQQT

SEQ ID NO: 1352 - protein, 18 aa, synthetic construct
KTINGSGSPHSKARPFQT

SEQ ID NO: 1353 - protein, 18 aa, synthetic construct
KTINGSGSPHSKPRVQQT

SEQ ID NO: 1354 - protein, 18 aa, synthetic construct
KTINGSGSPHSKAQVVLT

SEQ ID NO: 1355 - protein, 18 aa, synthetic construct
KTRRSSGSPHSKAQNQQT

SEQ ID NO: 1356 - protein, 18 aa, synthetic construct
KTINGSGSPHSKPSRQQT

SEQ ID NO: 1357 - protein, 18 aa, synthetic construct
KTINGSGSPHSVYRNQQT

SEQ ID NO: 1358 - protein, 18 aa, synthetic construct
KTINGSGSPHSKTCSQQT

SEQ ID NO: 1359 - protein, 18 aa, synthetic construct
KTINGSPSPHRKAQNQQT

SEQ ID NO: 1360 - protein, 18 aa, synthetic construct
KTINGRSSPHFKAQNQQT

SEQ ID NO: 1361 - protein, 18 aa, synthetic construct
KTINGSGSPHSKAQMVRT

SEQ ID NO: 1362 - protein, 18 aa, synthetic construct
KTINGSRSPHCSAQNQQT

SEQ ID NO: 1363 - protein, 18 aa, synthetic construct
KTINGSCSPHLRAQNQQT

SEQ ID NO: 1364 - protein, 18 aa, synthetic construct
KTINGSGSPHSKAQCLFT

SEQ ID NO: 1365 - protein, 18 aa, synthetic construct
KTINGRPSPHVKAQNQQT

SEQ ID NO: 1366 - protein, 18 aa, synthetic construct
KTINGSGSPHSMFPNQQT

SEQ ID NO: 1367 - protein, 18 aa, synthetic construct
KTINGMKSPHSKAQNQQT

SEQ ID NO: 1368 - protein, 18 aa, synthetic construct
KTINGSGSPHSKVRAQQT

SEQ ID NO: 1369 - protein, 18 aa, synthetic construct
KGLVGSGSPHSKAQNQQT

SEQ ID NO: 1370 - protein, 18 aa, synthetic construct
KTINGSRSPHVRAQNQQT

SEQ ID NO: 1371 - protein, 18 aa, synthetic construct
KTIRLRGSPHSKAQNQQT

SEQ ID NO: 1372 - protein, 18 aa, synthetic construct
KPRLGSGSPHSKAQNQQT

SEQ ID NO: 1373 - protein, 18 aa, synthetic construct
KTINGSGSPHSKAWYPQT

SEQ ID NO: 1374 - protein, 18 aa, synthetic construct
KTINGSCSPHVRAQNQQT

SEQ ID NO: 1375 - protein, 18 aa, synthetic construct
KTINGSGSPHSKRNVQQT

SEQ ID NO: 1376 - protein, 18 aa, synthetic construct
KTINGSGSPHSKRGLQQT

SEQ ID NO: 1377 - protein, 18 aa, synthetic construct
KTINGSGSPHSKRLAQQT

SEQ ID NO: 1378 - protein, 18 aa, synthetic construct
KTINGSGSPHSKVTRQQT

SEQ ID NO: 1379 - protein, 18 aa, synthetic construct
KTINGSGSPHTWLQNQQT

SEQ ID NO: 1380 - protein, 18 aa, synthetic construct
KTINGSGSPHSKQRSQQT

SEQ ID NO: 1381 - protein, 18 aa, synthetic construct
KTINGSGSPHSKAQRCST

SEQ ID NO: 1382 - protein, 18 aa, synthetic construct
KTINGSPSPHYLAQNQQT

SEQ ID NO: 1383 - protein, 18 aa, synthetic construct
KTINGRRSPHLKAQNQQT

SEQ ID NO: 1384 - protein, 18 aa, synthetic construct
KTINGSGSPHWSLQNQQT

SEQ ID NO: 1385 - protein, 18 aa, synthetic construct
KTINGVTSPHWKAQNQQT

SEQ ID NO: 1386 - protein, 18 aa, synthetic construct
KTINGSGSPHSKAQTTRT

SEQ ID NO: 1387 - protein, 18 aa, synthetic construct
KTINGSGSPHSKAQLFKT

SEQ ID NO: 1388 - protein, 18 aa, synthetic construct
KTINGSGSPHSKARSYQT

SEQ ID NO: 1389 - protein, 18 aa, synthetic construct
KTINGSGSPHSKLSRQQT

SEQ ID NO: 1390 - protein, 18 aa, synthetic construct
KTINGSGSPHLVFQNQQT

SEQ ID NO: 1391 - protein, 18 aa, synthetic construct
KTINGSGSPHSKAQLVKT

SEQ ID NO: 1392 - protein, 18 aa, synthetic construct
KTINGSGSPHSKAQTGRT

SEQ ID NO: 1393 - protein, 18 aa, synthetic construct
KTINGSGSPHSKARYSQT

SEQ ID NO: 1394 - protein, 18 aa, synthetic construct
KTINGRHSPHLKAQNQQT

SEQ ID NO: 1395 - protein, 18 aa, synthetic construct
KTINGSGSPHSFARNQQT

SEQ ID NO: 1396 - protein, 18 aa, synthetic construct
KTINGSGSPHSSCQNQQT

SEQ ID NO: 1397 - protein, 18 aa, synthetic construct
KTINGSGSPHSLFANQQT

SEQ ID NO: 1398 - protein, 18 aa, synthetic construct
KTINGSGSPHSKRLTQQT

SEQ ID NO: 1399 - protein, 18 aa, synthetic construct
KTINGSGSPHSKAQTART

SEQ ID NO: 1400 - protein, 18 aa, synthetic construct
KTINGSGSPHFLNQNQQT

SEQ ID NO: 1401 - protein, 18 aa, synthetic construct
KTINGSGSPHSKAQLILT

SEQ ID NO: 1402 - protein, 18 aa, synthetic construct
KEVGGSGSPHSKAQNQQT

SEQ ID NO: 1403 - protein, 18 aa, synthetic construct
KTINGSRSPHIRAQNQQT

SEQ ID NO: 1404 - protein, 18 aa, synthetic construct
KTINGSGSPHSSWLNQQT

SEQ ID NO: 1405 - protein, 18 aa, synthetic construct
KTINGSMSPHLYAQNQQT

SEQ ID NO: 1406 - protein, 18 aa, synthetic construct
KTINGMSSPHRKAQNQQT

SEQ ID NO: 1407 - protein, 18 aa, synthetic construct
KTINGSGSPHSKPRPQQT

SEQ ID NO: 1408 - protein, 18 aa, synthetic construct
KTINGSGSPHSGLWNQQT

SEQ ID NO: 1409 - protein, 18 aa, synthetic construct
KTINGSGSPHRWAQNQQT

SEQ ID NO: 1410 - protein, 18 aa, synthetic construct
KTINGSGSPHSKIRLQQT

SEQ ID NO: 1411 - protein, 18 aa, synthetic construct
KTINGSGSPHSKFSCQQT

SEQ ID NO: 1412 - protein, 18 aa, synthetic construct
KTINGSGSPHSKSCAQQT

SEQ ID NO: 1413 - protein, 18 aa, synthetic construct
KTINGSGSPHSKRLMQQT

SEQ ID NO: 1414 - protein, 18 aa, synthetic construct
KTSRCSGSPHSKAQNQQT

SEQ ID NO: 1415 - protein, 18 aa, synthetic construct
KTINGSGSPHSFLLNQQT

SEQ ID NO: 1416 - protein, 18 aa, synthetic construct
KTINGSGSPHCSAQNQQT

SEQ ID NO: 1417 - protein, 18 aa, synthetic construct
KTINGSGSPHSKAQPSKT

SEQ ID NO: 1418 - protein, 18 aa, synthetic construct
KTINGSGSPHSYVRNQQT

SEQ ID NO: 1419 - protein, 18 aa, synthetic construct
KTINGSGSPHSKAQQSRT

SEQ ID NO: 1420 - protein, 18 aa, synthetic construct
KTINGSGSPHSFVVNQQT

SEQ ID NO: 1421 - protein, 18 aa, synthetic construct
KTINGFRSPHSKAQNQQT

SEQ ID NO: 1422 - protein, 18 aa, synthetic construct
KTINGSGSPHSKWLVQQT

SEQ ID NO: 1423 - protein, 18 aa, synthetic construct
KTINGSGSPHSKRTAQQT

SEQ ID NO: 1424 - protein, 18 aa, synthetic construct
KTINGLFSPHRKAQNQQT

SEQ ID NO: 1425 - protein, 18 aa, synthetic construct
KTINTIESPHSKAQNQQT

SEQ ID NO: 1426 - protein, 18 aa, synthetic construct
KRLFGSGSPHSKAQNQQT

SEQ ID NO: 1427 - protein, 18 aa, synthetic construct
KTINGSGSPHSKAPNHLT

SEQ ID NO: 1428 - protein, 18 aa, synthetic construct
KTINGSGSPHLFRQNQQT

SEQ ID NO: 1429 - protein, 18 aa, synthetic construct
KTINGSGSPHSKASRHQT

SEQ ID NO: 1430 - protein, 18 aa, synthetic construct
KTINGSGSPHSKLSWQQT

SEQ ID NO: 1431 - protein, 18 aa, synthetic construct
KETAGSGSPHSKAQNQQT

SEQ ID NO: 1432 - protein, 18 aa, synthetic construct
KTINGHRSPHLKAQNQQT

SEQ ID NO: 1433 - protein, 18 aa, synthetic construct
KTINGSGSPHSKGCLQQT

SEQ ID NO: 1434 - protein, 18 aa, synthetic construct
KTINGSGSPHSKAQVLIT

SEQ ID NO: 1435 - protein, 18 aa, synthetic construct
KTINGSGSPHSKLRSQQT

SEQ ID NO: 1436 - protein, 18 aa, synthetic construct
KTINGTLSPHRKAQNQQT

SEQ ID NO: 1437 - protein, 18 aa, synthetic construct
KTINGSGSPHSTWTNQQT

SEQ ID NO: 1438 - protein, 18 aa, synthetic construct
KTINGSGSPHSKAQCRLT

SEQ ID NO: 1439 - protein, 18 aa, synthetic construct
KTINNLRSPHSKAQNQQT

SEQ ID NO: 1440 - protein, 18 aa, synthetic construct
KTINGSGSPHSKARANQT

SEQ ID NO: 1441 - protein, 18 aa, synthetic construct
KTINGRQSPHTKAQNQQT

SEQ ID NO: 1442 - protein, 18 aa, synthetic construct
KTINSARSPHSKAQNQQT

SEQ ID NO: 1443 - protein, 18 aa, synthetic construct
KTINGCSSPHRKAQNQQT

SEQ ID NO: 1444 - protein, 18 aa, synthetic construct
KTINGSVSPHFMAQNQQT

SEQ ID NO: 1445 - protein, 18 aa, synthetic construct
KTINGSGSPHSLCQNQQT

SEQ ID NO: 1446 - protein, 18 aa, synthetic construct
KTINGSLSPHLFAQNQQT

SEQ ID NO: 1447 - protein, 18 aa, synthetic construct
KTINGSGSPHSKACPLQT

SEQ ID NO: 1448 - protein, 18 aa, synthetic construct
KTINGRTSPHRKAQNQQT

SEQ ID NO: 1449 - protein, 18 aa, synthetic construct
KTINGSGSPHSKRATQQT

SEQ ID NO: 1450 - protein, 18 aa, synthetic construct
KTINGSGSPHSKARIMQT

SEQ ID NO: 1451 - protein, 18 aa, synthetic construct
KTINGSGSPHVTWQNQQT

SEQ ID NO: 1452 - protein, 18 aa, synthetic construct
KTINGSGSPHSKRLPQQT

SEQ ID NO: 1453 - protein, 18 aa, synthetic construct
KTINGSGSPHSKAQGFRT

SEQ ID NO: 1454 - protein, 18 aa, synthetic construct
KTINGSGSPHLYGQNQQT

SEQ ID NO: 1455 - protein, 18 aa, synthetic construct
KTINGSGSPHLSCQNQQT

SEQ ID NO: 1456 - protein, 18 aa, synthetic construct
KTINGSGSPHSKAQFTLT

SEQ ID NO: 1457 - protein, 18 aa, synthetic construct
KTINGSRSPHFKAQNQQT

SEQ ID NO: 1458 - protein, 18 aa, synthetic construct
KTINGRPSPHSKAQNQQT

SEQ ID NO: 1459 - protein, 18 aa, synthetic construct
KTINGFSSPHRKAQNQQT

SEQ ID NO: 1460 - protein, 18 aa, synthetic construct
KTINGRASPHVKAQNQQT

SEQ ID NO: 1461 - protein, 18 aa, synthetic construct
KTINGSGSPHSKAQNEVH

SEQ ID NO: 1462 - protein, 18 aa, synthetic construct
KTINGSGSPHSKRSLQQT

SEQ ID NO: 1463 - protein, 18 aa, synthetic construct
KTINGSGSPHRSRQNQQT

SEQ ID NO: 1464 - protein, 18 aa, synthetic construct
KPPTGSGSPHSKAQNQQT

SEQ ID NO: 1465 - protein, 18 aa, synthetic construct
KTINGSGSPHSKAARTQT

SEQ ID NO: 1466 - protein, 18 aa, synthetic construct
KTINGSGSPHSSWANQQT

SEQ ID NO: 1467 - protein, 18 aa, synthetic construct
KTINGSGSPHSKAQRHAT

SEQ ID NO: 1468 - protein, 18 aa, synthetic construct
KTINSPRSPHSKAQNQQT

SEQ ID NO: 1469 - protein, 18 aa, synthetic construct
KTINGSGSPHSKSERQQT

SEQ ID NO: 1470 - protein, 18 aa, synthetic construct
KTINGSGSPHALFQNQQT

SEQ ID NO: 1471 - protein, 18 aa, synthetic construct
KTINGSGSPHSKAQCYVT

SEQ ID NO: 1472 - protein, 18 aa, synthetic construct
KTINGVASPHRKAQNQQT

SEQ ID NO: 1473 - protein, 18 aa, synthetic construct
KTINGSGSPHSALWNQQT

SEQ ID NO: 1474 - protein, 18 aa, synthetic construct
KTINGSGSPHSKSVRQQT

SEQ ID NO: 1475 - protein, 18 aa, synthetic construct
KTINGSGSPHSHMENQQT

SEQ ID NO: 1476 - protein, 18 aa, synthetic construct
KTINGSGTPHSKAQNQQT

SEQ ID NO: 1477 - protein, 18 aa, synthetic construct
KTINGSGSPHSKTGRQQT

SEQ ID NO: 1478 - protein, 18 aa, synthetic construct
KTINGSGSPHSKAQANRT

SEQ ID NO: 1479 - protein, 18 aa, synthetic construct
KTINGSGSPHSKARFSQT

SEQ ID NO: 1480 - protein, 18 aa, synthetic construct
KYLLGSGSPHSKAQNQQT

SEQ ID NO: 1481 - protein, 18 aa, synthetic construct
KTINGSGSPHCSSQNQQT

SEQ ID NO: 1482 - protein, 18 aa, synthetic construct
KTINGSMSPHRKAQNQQT

SEQ ID NO: 1483 - protein, 18 aa, synthetic construct
KTINGNLSPHRKAQNQQT

SEQ ID NO: 1484 - protein, 18 aa, synthetic construct
KEVAGSGSPHSKAQNQQT

SEQ ID NO: 1485 - protein, 18 aa, synthetic construct
KTINLSRSPHSKAQNQQT

SEQ ID NO: 1486 - protein, 18 aa, synthetic construct
KTINGSGSPHSKARQQQT

SEQ ID NO: 1487 - protein, 18 aa, synthetic construct
KTINGTPSPHRKAQNQQT

SEQ ID NO: 1488 - protein, 18 aa, synthetic construct
KTINGSGSPHSKFKLQQT

SEQ ID NO: 1489 - protein, 18 aa, synthetic construct
KTINGSGSPHSKAWLLQT

SEQ ID NO: 1490 - protein, 18 aa, synthetic construct
KTINGLRSPHSKAQNQQT

SEQ ID NO: 1491 - protein, 18 aa, synthetic construct
KTINGRLSPHRKAQNQQT

SEQ ID NO: 1492 - protein, 18 aa, synthetic construct
KTINGSPSPHLFAQNQQT

SEQ ID NO: 1493 - protein, 18 aa, synthetic construct
KDLRGSGSPHSKAQNQQT

SEQ ID NO: 1494 - protein, 18 aa, synthetic construct
KTINGSGSPHSKAQLAKT

SEQ ID NO: 1495 - protein, 18 aa, synthetic construct
KTINGSGSPHSKPRSQQT

SEQ ID NO: 1496 - protein, 18 aa, synthetic construct
KTINGSGSPHSKKMSQQT

SEQ ID NO: 1497 - protein, 18 aa, synthetic construct
KTINGSGSPHSKAQLIVT

SEQ ID NO: 1498 - protein, 18 aa, synthetic construct
KTINGSGSPHSKARFTQT

SEQ ID NO: 1499 - protein, 18 aa, synthetic construct
KTINGSGSPHPLFQNQQT

SEQ ID NO: 1500 - protein, 18 aa, synthetic construct
KTINGSGSPHSKAQRGMT

SEQ ID NO: 1501 - protein, 18 aa, synthetic construct
KTINGSGSPHSKAQNLRR

SEQ ID NO: 1502 - protein, 18 aa, synthetic construct
KTINGSGSPHSKAQFRVT

SEQ ID NO: 1503 - protein, 18 aa, synthetic construct
KTINGSGSPHSKAFVRQT

SEQ ID NO: 1504 - protein, 18 aa, synthetic construct
KTINGSGSPHSKARLTQT

SEQ ID NO: 1505 - protein, 18 aa, synthetic construct
KTINGSGSPHRFKQNQQT

SEQ ID NO: 1506 - protein, 18 aa, synthetic construct
KTINGSGSPHSKEETQQT

SEQ ID NO: 1507 - protein, 18 aa, synthetic construct
KTINGSGSPHSKTRAQQT

SEQ ID NO: 1508 - protein, 18 aa, synthetic construct
KTINGSGSPHSVSWNQQT

SEQ ID NO: 1509 - protein, 18 aa, synthetic construct
KTINGSGSPHTKWQNQQT

SEQ ID NO: 1510 - protein, 18 aa, synthetic construct
KTINGSNSPHRKAQNQQT

SEQ ID NO: 1511 - protein, 18 aa, synthetic construct
KTINGSGSPHSKAQNKRS

SEQ ID NO: 1512 - protein, 18 aa, synthetic construct
KTINGSGSPHSTRQNQQT

SEQ ID NO: 1513 - protein, 18 aa, synthetic construct
KTINGTRSPHTKAQNQQT

SEQ ID NO: 1514 - protein, 18 aa, synthetic construct
KTINGSGSPHVLFQNQQT

SEQ ID NO: 1515 - protein, 18 aa, synthetic construct
KTINGSVSPHYLAQNQQT

SEQ ID NO: 1516 - protein, 18 aa, synthetic construct
KTINGALSPHRKAQNQQT

SEQ ID NO: 1517 - protein, 18 aa, synthetic construct
KTINGSGSPHSKARLYQT

SEQ ID NO: 1518 - protein, 18 aa, synthetic construct
KTINGSGSPHEHNQNQQT

SEQ ID NO: 1519 - protein, 18 aa, synthetic construct
KTINGVLSPHWKAQNQQT

SEQ ID NO: 1520 - protein, 18 aa, synthetic construct
KTINGSGSPHSKASRQQT

SEQ ID NO: 1521 - protein, 18 aa, synthetic construct
KTINGSGSPHSKRSFQQT

SEQ ID NO: 1522 - protein, 18 aa, synthetic construct
KTINGSGSPHSKRVSQQT

SEQ ID NO: 1523 - protein, 18 aa, synthetic construct
KTINGSGSPHSYSRNQQT

SEQ ID NO: 1524 - protein, 18 aa, synthetic construct
KTINGSGSPHSTVWNQQT

SEQ ID NO: 1525 - protein, 18 aa, synthetic construct
KTINGSGSPHSVLFNQQT

SEQ ID NO: 1526 - protein, 18 aa, synthetic construct
KTINGPLSPHCKAQNQQT

SEQ ID NO: 1527 - protein, 18 aa, synthetic construct
KTINGSGSPHSKRVGQQT

SEQ ID NO: 1528 - protein, 18 aa, synthetic construct
KTINGSGSPHSKLWSQQT

SEQ ID NO: 1529 - protein, 18 aa, synthetic construct
KTINGSGSPHSKAQGVRT

SEQ ID NO: 1530 - protein, 18 aa, synthetic construct
KTINGSVSPHRRAQNQQT

SEQ ID NO: 1531 - protein, 18 aa, synthetic construct
KTINGSGSPHLRFQNQQT

SEQ ID NO: 1532 - protein, 18 aa, synthetic construct
KTINGSASPHVFAQNQQT

SEQ ID NO: 1533 - protein, 18 aa, synthetic construct
KTWVRSGSPHSKAQNQQT

SEQ ID NO: 1534 - protein, 18 aa, synthetic construct
KTINGSGSPHSKARMQQT

SEQ ID NO: 1535 - protein, 18 aa, synthetic construct
KTINGSGSPHSKASRGQT

SEQ ID NO: 1536 - protein, 18 aa, synthetic construct
KTINGSGSPHSKAQVCLT

SEQ ID NO: 1537 - protein, 18 aa, synthetic construct
KTINGSGSPHSKARGVQT

SEQ ID NO: 1538 - protein, 18 aa, synthetic construct
KTINGSGSPHGLWQNQQT

SEQ ID NO: 1539 - protein, 18 aa, synthetic construct
KTINGSGSPHSKAQVWFT

SEQ ID NO: 1540 - protein, 18 aa, synthetic construct
KTINGSGSPHSKAQVTLT

SEQ ID NO: 1541 - protein, 18 aa, synthetic construct
KTINGSGSPHSKAQLRIT

SEQ ID NO: 1542 - protein, 18 aa, synthetic construct
KDSLGSGSPHSKAQNQQT

SEQ ID NO: 1543 - protein, 18 aa, synthetic construct
KTINGSGSPHSKRASQQT

SEQ ID NO: 1544 - protein, 18 aa, synthetic construct
KTINGSGSPHSKRINQQT

SEQ ID NO: 1545 - protein, 18 aa, synthetic construct
KTINGSGSPHSKASKNQT

SEQ ID NO: 1546 - protein, 18 aa, synthetic construct
KTINGSGSPHSKAQLPWT

SEQ ID NO: 1547 - protein, 18 aa, synthetic construct
KTINGSGSPHSKLTRQQT

SEQ ID NO: 1548 - protein, 18 aa, synthetic construct
KTINGSGSPHSKTNRQQT

SEQ ID NO: 1549 - protein, 18 aa, synthetic construct
KTINRVISPHSKAQNQQT

SEQ ID NO: 1550 - protein, 18 aa, synthetic construct
KTINGSGSPHTLWQNQQT

SEQ ID NO: 1551 - protein, 18 aa, synthetic construct
KTINGSGSPHSRRQNQQT

SEQ ID NO: 1552 - protein, 18 aa, synthetic construct
KTINGSGSPHSKGGRQQT

SEQ ID NO: 1553 - protein, 18 aa, synthetic construct
KTINGSESPHDSAQNQQT

SEQ ID NO: 1554 - protein, 18 aa, synthetic construct
KTINGSGSPHSRPRNQQT

SEQ ID NO: 1555 - protein, 18 aa, synthetic construct
KTINGSGSPHSRKQNQQT

SEQ ID NO: 1556 - protein, 18 aa, synthetic construct
KTINGSGSPHSKAQEELT

SEQ ID NO: 1557 - protein, 18 aa, synthetic construct
KTINGWRSPHSKAQNQQT

SEQ ID NO: 1558 - protein, 18 aa, synthetic construct
KTINGSGSPHSLLYNQQT

SEQ ID NO: 1559 - protein, 18 aa, synthetic construct
KTINGSGSPHSFRLNQQT

SEQ ID NO: 1560 - protein, 18 aa, synthetic construct
KTINGSGSPHSKAQFLRT

SEQ ID NO: 1561 - protein, 18 aa, synthetic construct
KTINGSGSPHSKQSRQQT

SEQ ID NO: 1562 - protein, 18 aa, synthetic construct
KTINGSRSPHSKAQNRQT

SEQ ID NO: 1563 - protein, 18 aa, synthetic construct
KTINGRPSPHIKAQNQQT

SEQ ID NO: 1564 - protein, 18 aa, synthetic construct
KTINGSGSPHSKRLVQQT

SEQ ID NO: 1565 - protein, 18 aa, synthetic construct
KGHEGSGSPHSKAQNQQT

SEQ ID NO: 1566 - protein, 18 aa, synthetic construct
KTINGSGSPHSKAQKRST

SEQ ID NO: 1567 - protein, 18 aa, synthetic construct
KTINGSGSPHSYLLNQQT

SEQ ID NO: 1568 - protein, 18 aa, synthetic construct
KTINGSGSPHSKPRGQQT

SEQ ID NO: 1569 - protein, 18 aa, synthetic construct
KTINGSGSPHSKTRLQQT

SEQ ID NO: 1570 - protein, 18 aa, synthetic construct
KTINGSGSPHSKSHRQQT

SEQ ID NO: 1571 - protein, 18 aa, synthetic construct
KEIKGSGSPHSKAQNQQT

SEQ ID NO: 1572 - protein, 18 aa, synthetic construct
KTINGSGSPHSKARGIQT

SEQ ID NO: 1573 - protein, 18 aa, synthetic construct
KTINGYRSPHSKAQNQQT

SEQ ID NO: 1574 - protein, 18 aa, synthetic construct
KTINGSGSPHSKLWTQQT

SEQ ID NO: 1575 - protein, 18 aa, synthetic construct
KTINGSGSPHSKPWLQQT

SEQ ID NO: 1576 - protein, 18 aa, synthetic construct
KTINGSGSPHWSVQNQQT

SEQ ID NO: 1577 - protein, 18 aa, synthetic construct
KTINGSGSPHSKVARQQT

SEQ ID NO: 1578 - protein, 18 aa, synthetic construct
KTINGSGSPHTLFQNQQT

SEQ ID NO: 1579 - protein, 18 aa, synthetic construct
KTINGSCSPHLAAQNQQT

SEQ ID NO: 1580 - protein, 18 aa, synthetic construct
KTINGSGSPHSKTSRQQT

SEQ ID NO: 1581 - protein, 18 aa, synthetic construct
KTINGSGSPHSKAQNARH

SEQ ID NO: 1582 - protein, 18 aa, synthetic construct
KTINGSGSPHSKAQLKLT

SEQ ID NO: 1583 - protein, 18 aa, synthetic construct
KTINGSGSPHSKAQNWRT

SEQ ID NO: 1584 - protein, 18 aa, synthetic construct
KTINGSGSPHFLPQNQQT

SEQ ID NO: 1585 - protein, 18 aa, synthetic construct
KTINGSGSPHSKNVRQQT

SEQ ID NO: 1586 - protein, 18 aa, synthetic construct
KTINGSGSPHFMRQNQQT

SEQ ID NO: 1587 - protein, 18 aa, synthetic construct
KTINGSGSPHGWAQNQQT

SEQ ID NO: 1588 - protein, 18 aa, synthetic construct
KTINGSGSPHFHLQNQQT

SEQ ID NO: 1589 - protein, 18 aa, synthetic construct
KTINGSASPHWSAQNQQT

SEQ ID NO: 1590 - protein, 18 aa, synthetic construct
KTINGSSSPHSWAQNQQT

SEQ ID NO: 1591 - protein, 18 aa, synthetic construct
KTINGSGSPHSKAHRQQT

SEQ ID NO: 1592 - protein, 18 aa, synthetic construct
KTINGSGSPHSKQRVQQT

SEQ ID NO: 1593 - protein, 18 aa, synthetic construct
KTLRRSGSPHSKAQNQQT

SEQ ID NO: 1594 - protein, 18 aa, synthetic construct
KTINGSGSPHSKGVRQQT

SEQ ID NO: 1595 - protein, 18 aa, synthetic construct
KTINGSLSPHTWAQNQQT

SEQ ID NO: 1596 - protein, 18 aa, synthetic construct
KTINGSGSPHSKRALQQT

SEQ ID NO: 1597 - protein, 18 aa, synthetic construct
KTINGSGSPHCLSQNQQT

SEQ ID NO: 1598 - protein, 18 aa, synthetic construct
KTINGSGSPHSKAQSLKT

SEQ ID NO: 1599 - protein, 18 aa, synthetic construct
KTINGSGSPHSFVRNQQT

SEQ ID NO: 1600 - protein, 18 aa, synthetic construct
KTINGSGSPHSIFSNQQT

SEQ ID NO: 1601 - protein, 18 aa, synthetic construct
KTINGSGSPHSKVSRQQT

SEQ ID NO: 1602 - protein, 18 aa, synthetic construct
KTINGSGSPHSKARNKQT

SEQ ID NO: 1603 - protein, 18 aa, synthetic construct
KTINASGSPHSKAQGQQT

SEQ ID NO: 1604 - protein, 18 aa, synthetic construct
KTINGSGSPHSKLRMQQT

SEQ ID NO: 1605 - protein, 18 aa, synthetic construct
KTINGSWSPHMLAQNQQT

SEQ ID NO: 1606 - protein, 18 aa, synthetic construct
KTINGSGSPHSLFPNQQT

SEQ ID NO: 1607 - protein, 18 aa, synthetic construct
KPPLGSGSPHSKAQNQQT

SEQ ID NO: 1608 - protein, 18 aa, synthetic construct
KTINGIASPHRKAQNQQT

SEQ ID NO: 1609 - protein, 18 aa, synthetic construct
KTINGSCSPHSLAQNQQT

SEQ ID NO: 1610 - protein, 18 aa, synthetic construct
KTINGRLSPHFKAQNQQT

SEQ ID NO: 1611 - protein, 18 aa, synthetic construct
KTINGSGSPHSKARMTQT

SEQ ID NO: 1612 - protein, 18 aa, synthetic construct
KTINGSGSPHSKARLQQT

SEQ ID NO: 1613 - protein, 18 aa, synthetic construct
KTINGSGSPHSKWVSQQT

SEQ ID NO: 1614 - protein, 18 aa, synthetic construct
KTINGSGSPHSKKVSQQT

SEQ ID NO: 1615 - protein, 18 aa, synthetic construct
KTINGSGSPHSKAQSYRT

SEQ ID NO: 1616 - protein, 18 aa, synthetic construct
KAFNGSGSPHSKAPNQQT

SEQ ID NO: 1617 - protein, 18 aa, synthetic construct
KTINGSGSPHSKAQYRLT

SEQ ID NO: 1618 - protein, 18 aa, synthetic construct
KTINGSWSPHLVAQNQQT

SEQ ID NO: 1619 - protein, 18 aa, synthetic construct
KTINGSGSPHSWTQNQQT

SEQ ID NO: 1620 - protein, 18 aa, synthetic construct
KTINGSGSPHSKAQSHRT

SEQ ID NO: 1621 - protein, 18 aa, synthetic construct
KGINGSGSPHGKAQNQQT

SEQ ID NO: 1622 - protein, 18 aa, synthetic construct
KTINGSGSPHSKAQNRKL

SEQ ID NO: 1623 - protein, 18 aa, synthetic construct
KTINGRYSPHSKAQNQQT

SEQ ID NO: 1624 - protein, 18 aa, synthetic construct
KTINGSGSPHSKGRSQQT

SEQ ID NO: 1625 - protein, 18 aa, synthetic construct
KTINGSGSPHCVAQNQQT

SEQ ID NO: 1626 - protein, 18 aa, synthetic construct
KTINGSGSPHSKIRPQQT

SEQ ID NO: 1627 - protein, 18 aa, synthetic construct
KTINGSGSPHSKAQSSKT

SEQ ID NO: 1628 - protein, 18 aa, synthetic construct
KTINGSGSPHSKRPFQQT

SEQ ID NO: 1629 - protein, 18 aa, synthetic construct
KTINGSSSPHCLAQNQQT

SEQ ID NO: 1630 - protein, 18 aa, synthetic construct
KTINGTRSPHAKAQNQQT

SEQ ID NO: 1631 - protein, 18 aa, synthetic construct
KTINGSGSPHLLFQNQQT

SEQ ID NO: 1632 - protein, 18 aa, synthetic construct
KTINGRRSPHTKAQNQQT

SEQ ID NO: 1633 - protein, 18 aa, synthetic construct
KTINGSGSPHSKASKQQT

SEQ ID NO: 1634 - protein, 18 aa, synthetic construct
KTINGSGSPHSKAQLGRT

SEQ ID NO: 1635 - protein, 18 aa, synthetic construct
KTINGSGSPHSVFLNQQT

SEQ ID NO: 1636 - protein, 18 aa, synthetic construct
KTINGSGSPHSKSARQQT

SEQ ID NO: 1637 - protein, 18 aa, synthetic construct
KTINGSGSPHSKLRLQQT

SEQ ID NO: 1638 - protein, 18 aa, synthetic construct
KTRKSSGSPHSKAQNQQT

SEQ ID NO: 1639 - protein, 18 aa, synthetic construct
KTINGFRSPHLKAQNQQT

SEQ ID NO: 1640 - protein, 18 aa, synthetic construct
KTINGSGSPHSKRSIQQT

SEQ ID NO: 1641 - protein, 18 aa, synthetic construct
KTINGSGSPHSKGRIQQT

SEQ ID NO: 1642 - protein, 18 aa, synthetic construct
KTINGSRSPHRPAQNQQT

SEQ ID NO: 1643 - protein, 18 aa, synthetic construct
KTINGSGSPHSKLRPQQT

SEQ ID NO: 1644 - protein, 18 aa, synthetic construct
KTINGSGSPHMYAQNQQT

SEQ ID NO: 1645 - protein, 18 aa, synthetic construct
KTINGRTSPHAKAQNQQT

SEQ ID NO: 1646 - protein, 18 aa, synthetic construct
KTINGSGSPHSKAGRGQT

SEQ ID NO: 1647 - protein, 18 aa, synthetic construct
KTINGSGSPHSKLMRQQT

SEQ ID NO: 1648 - protein, 18 aa, synthetic construct
KTINGSGSPHSKANKSQT

SEQ ID NO: 1649 - protein, 18 aa, synthetic construct
KTINGSGSPHSKAVRQQT

SEQ ID NO: 1650 - protein, 18 aa, synthetic construct
KTINGSGSPHSKCLSQQT

SEQ ID NO: 1651 - protein, 18 aa, synthetic construct
KTINGSGSPHSKAQWVLT

SEQ ID NO: 1652 - protein, 18 aa, synthetic construct
KTINGSGSPHSKAQFWVT

SEQ ID NO: 1653 - protein, 18 aa, synthetic construct
KTINGSGSPHSKALCRQT

SEQ ID NO: 1654 - protein, 18 aa, synthetic construct
KEVMGSGSPHSKAQNQQT

SEQ ID NO: 1655 - protein, 18 aa, synthetic construct
KTINGSGSPHSKNTRQQT

SEQ ID NO: 1656 - protein, 18 aa, synthetic construct
KTINGSGSPHTWTQNQQT

SEQ ID NO: 1657 - protein, 18 aa, synthetic construct
KTINGSTSPHWSAQNQQT

SEQ ID NO: 1658 - protein, 18 aa, synthetic construct
KTINGNVSPHRKAQNQQT

SEQ ID NO: 1659 - protein, 18 aa, synthetic construct
KTINGSTSPHLFAQNQQT

SEQ ID NO: 1660 - protein, 18 aa, synthetic construct
KTINGSGSPHSKAQNYRA

SEQ ID NO: 1661 - protein, 18 aa, synthetic construct
KTINGSGSPHSKARGQQT

SEQ ID NO: 1662 - protein, 18 aa, synthetic construct
KTINGSGSPHSKAQNRIR

SEQ ID NO: 1663 - protein, 18 aa, synthetic construct
KTINGSGSPHSKWTLQQT

SEQ ID NO: 1664 - protein, 18 aa, synthetic construct
KTINGSGSPHSKAQMKCT

SEQ ID NO: 1665 - protein, 18 aa, synthetic construct
KTINGSGSPHSLWQNQQT

SEQ ID NO: 1666 - protein, 18 aa, synthetic construct
KTINGSGSPHSKAQLSKT

SEQ ID NO: 1667 - protein, 18 aa, synthetic construct
KTINLIWSPHSKAQNQQT

SEQ ID NO: 1668 - protein, 18 aa, synthetic construct
KTINGSGSPHSKRVLQQT

SEQ ID NO: 1669 - protein, 18 aa, synthetic construct
KTINGSGSPHSKVRVQQT

SEQ ID NO: 1670 - protein, 18 aa, synthetic construct
KTINSRFSPHSKAQNQQT

SEQ ID NO: 1671 - protein, 18 aa, synthetic construct
KRSKGSGSPHSKAQNQQT

SEQ ID NO: 1672 - protein, 18 aa, synthetic construct
KTINGSGSPHRRLQNQQT

SEQ ID NO: 1673 - protein, 18 aa, synthetic construct
KTINGSGSPHSCAQNQQT

SEQ ID NO: 1674 - protein, 18 aa, synthetic construct
KTINGPLSPHRKAQNQQT

SEQ ID NO: 1675 - protein, 18 aa, synthetic construct
KTINGSVSPHLYAQNQQT

SEQ ID NO: 1676 - protein, 18 aa, synthetic construct
KTINGRISPHLKAQNQQT

SEQ ID NO: 1677 - protein, 18 aa, synthetic construct
KTINGSHSPHRKAQNQQT

SEQ ID NO: 1678 - protein, 18 aa, synthetic construct
KTINGSGSPHSKAQVSIT

SEQ ID NO: 1679 - protein, 18 aa, synthetic construct
KTINGSMSPHRRAQNQQT

SEQ ID NO: 1680 - protein, 18 aa, synthetic construct
KTINGRQSPHAKAQNQQT

SEQ ID NO: 1681 - protein, 18 aa, synthetic construct
KTINGSGSPHSKAVWRQT

SEQ ID NO: 1682 - protein, 18 aa, synthetic construct
KQPLGSGSPHSKAQNQQT

SEQ ID NO: 1683 - protein, 18 aa, synthetic construct
KTINGSGSPHSKAQNVKL

SEQ ID NO: 1684 - protein, 18 aa, synthetic construct
KTINGSGSPHSKRGTQQT

SEQ ID NO: 1685 - protein, 18 aa, synthetic construct
KTINGSVSPHYVAQNQQT

SEQ ID NO: 1686 - protein, 18 aa, synthetic construct
KTINGSGSPHSKNLRQQT

SEQ ID NO: 1687 - protein, 18 aa, synthetic construct
KTINGSGSPHSKAQAFRT

SEQ ID NO: 1688 - protein, 18 aa, synthetic construct
KTINGSGSPHSKCSNQQT

SEQ ID NO: 1689 - protein, 18 aa, synthetic construct
KELVGSGSPHSKAQNQQT

SEQ ID NO: 1690 - protein, 18 aa, synthetic construct
KTINGSGSPHSLVFNQQT

SEQ ID NO: 1691 - protein, 18 aa, synthetic construct
KTINGSGSPHSKAQATRT

SEQ ID NO: 1692 - protein, 18 aa, synthetic construct
KTINGTSSPHCKAQNQQT

SEQ ID NO: 1693 - protein, 18 aa, synthetic construct
KTINGSGSPHSKALWRQT

SEQ ID NO: 1694 - protein, 18 aa, synthetic construct
KTINGSGSPHSKAQFSVT

SEQ ID NO: 1695 - protein, 18 aa, synthetic construct
KTINGSGSPHSKLYMQQT

SEQ ID NO: 1696 - protein, 18 aa, synthetic construct
KTINGSLSPHYMAQNQQT

SEQ ID NO: 1697 - protein, 18 aa, synthetic construct
KTINGSGSPHSKAWLMQT

SEQ ID NO: 1698 - protein, 18 aa, synthetic construct
KTINGSGSPHSKSLKQQT

SEQ ID NO: 1699 - protein, 18 aa, synthetic construct
KTINGSGSPHSKAQNTRR

SEQ ID NO: 1700 - protein, 18 aa, synthetic construct
KTINGSGSPHYLLQNQQT

SEQ ID NO: 1701 - protein, 18 aa, synthetic construct
KTINGSGSPHTWSQNQQT

SEQ ID NO: 1702 - protein, 18 aa, synthetic construct
KTINGSGSPHSKTRMQQT

SEQ ID NO: 1703 - protein, 18 aa, synthetic construct
KTINTRPSPHSKAQNQQT

SEQ ID NO: 1704 - protein, 18 aa, synthetic construct
KTINGSGSPHSKAQILVT

SEQ ID NO: 1705 - protein, 18 aa, synthetic construct
KTINGSGSPHSKAQNAKS

SEQ ID NO: 1706 - protein, 18 aa, synthetic construct
KTINGSGSPHSRTYNQQT

SEQ ID NO: 1707 - protein, 18 aa, synthetic construct
KTINGSGSPHSKKGGQQT

SEQ ID NO: 1708 - protein, 18 aa, synthetic construct
KTINGYSSPHRKAQNQQT

SEQ ID NO: 1709 - protein, 18 aa, synthetic construct
KTINGSGSPHWVSQNQQT

SEQ ID NO: 1710 - protein, 18 aa, synthetic construct
KTINGSGSPHSKARLAQT

SEQ ID NO: 1711 - protein, 18 aa, synthetic construct
KTINGMCSPHSKAQNQQT

SEQ ID NO: 1712 - protein, 18 aa, synthetic construct
KTINGSGSPHSKSNKQQT

SEQ ID NO: 1713 - protein, 18 aa, synthetic construct
KTINGSGSPHSKAQFVLT

SEQ ID NO: 1714 - protein, 18 aa, synthetic construct
KTINGSISPHFVAQNQQT

SEQ ID NO: 1715 - protein, 18 aa, synthetic construct
KTINGSGSPHRRMQNQQT

SEQ ID NO: 1716 - protein, 18 aa, synthetic construct
KTINGSGSPHSKAWILQT

SEQ ID NO: 1717 - protein, 18 aa, synthetic construct
KTINGSGSPHSKAQGVKT

SEQ ID NO: 1718 - protein, 18 aa, synthetic construct
KTINGSGSPHSKAQFSLT

SEQ ID NO: 1719 - protein, 18 aa, synthetic construct
KTINMLRSPHSKAQNQQT

SEQ ID NO: 1720 - protein, 18 aa, synthetic construct
KTINGSGSPHSKAQLGKT

SEQ ID NO: 1721 - protein, 18 aa, synthetic construct
KTINGSGSPHSMYLNQQT

SEQ ID NO: 1722 - protein, 18 aa, synthetic construct
KTINGHDSPHVTDQNQQT

SEQ ID NO: 1723 - protein, 18 aa, synthetic construct
KTINGHDSPHKRGQHRQT

SEQ ID NO: 1724 - protein, 18 aa, synthetic construct
KMPEGHDSPHKSGQNQQT

SEQ ID NO: 1725 - protein, 18 aa, synthetic construct
KMEGGHDSPHKSGQNQQT

SEQ ID NO: 1726 - protein, 18 aa, synthetic construct
KMEYGHDSPHKSGQNQQT

SEQ ID NO: 1727 - protein, 18 aa, synthetic construct
KAEWGHDSPHKSGQNQQT

SEQ ID NO: 1728 - protein, 18 aa, synthetic construct
KCEWGHDSPHKSGQNQQT

SEQ ID NO: 1729 - protein, 18 aa, synthetic construct
KANNGQDSPHKSGQNQQT

SEQ ID NO: 1730 - protein, 18 aa, synthetic construct
KTINGHDSPHLCGQNQQT

SEQ ID NO: 1731 - protein, 18 aa, synthetic construct
KIPEGHDSPHKSGQNQQT

SEQ ID NO: 1732 - protein, 18 aa, synthetic construct
KADMGHDSPHKSGQNQQT

SEQ ID NO: 1733 - protein, 18 aa, synthetic construct
KTINGHLSPHYFGQNQQT

SEQ ID NO: 1734 - protein, 18 aa, synthetic construct
KIEYGHDSPHKSGQNQQT

SEQ ID NO: 1735 - protein, 18 aa, synthetic construct
KADYGHDSPHKSGQNQQT

SEQ ID NO: 1736 - protein, 18 aa, synthetic construct
KIETGHDSPHKSGQNQQT

SEQ ID NO: 1737 - protein, 18 aa, synthetic construct
KTINGHDSPHTNGQKQQT

SEQ ID NO: 1738 - protein, 18 aa, synthetic construct
KMEWGHDSPHKSGQNQQT

SEQ ID NO: 1739 - protein, 18 aa, synthetic construct
KTINGHDSPHWLLQNQQT

SEQ ID NO: 1740 - protein, 18 aa, synthetic construct
KCEYGHDSPHKSGQNQQT

SEQ ID NO: 1741 - protein, 18 aa, synthetic construct
KRINGHDSPHKSGQKQQN

SEQ ID NO: 1742 - protein, 18 aa, synthetic construct
KMEIGHDSPHKSGQNQQT

SEQ ID NO: 1743 - protein, 18 aa, synthetic construct
KLEYGHDSPHKSGQNQQT

SEQ ID NO: 1744 - protein, 18 aa, synthetic construct
KADWGHDSPHKSGQNQQT

SEQ ID NO: 1745 - protein, 18 aa, synthetic construct
KIEIGHDSPHKSGQNQQT

SEQ ID NO: 1746 - protein, 18 aa, synthetic construct
KTIKDNDSPHKSGQNQQT

SEQ ID NO: 1747 - protein, 18 aa, synthetic construct
KDIMGHDSPHKSGQNQQT

SEQ ID NO: 1748 - protein, 18 aa, synthetic construct
KFEQGHDSPHKSGQNQQT

SEQ ID NO: 1749 - protein, 18 aa, synthetic construct
KMEFGHDSPHKSGQNQQT

SEQ ID NO: 1750 - protein, 18 aa, synthetic construct
KCDQGHDSPHKSGQNQQT

SEQ ID NO: 1751 - protein, 18 aa, synthetic construct
KLPEGHDSPHKSGQNQQT

SEQ ID NO: 1752 - protein, 18 aa, synthetic construct
KIENGHDSPHKSGQNQQT

SEQ ID NO: 1753 - protein, 18 aa, synthetic construct
KMESGHDSPHKSGQNQQT

SEQ ID NO: 1754 - protein, 18 aa, synthetic construct
KAEIGHDSPHKSGQNQQT

SEQ ID NO: 1755 - protein, 18 aa, synthetic construct
KVEYGHDSPHKSGQNQQT

SEQ ID NO: 1756 - protein, 18 aa, synthetic construct
KIINGHDSPHKSGLTQQT

SEQ ID NO: 1757 - protein, 18 aa, synthetic construct
KTSNGDDSPHKSGRNQQT

SEQ ID NO: 1758 - protein, 18 aa, synthetic construct
KIEVGHDSPHKSGQNQQT

SEQ ID NO: 1759 - protein, 18 aa, synthetic construct
KMEMGHDSPHKSGQNQQT

SEQ ID NO: 1760 - protein, 18 aa, synthetic construct
KAEVGHDSPHKSGQNQQT

SEQ ID NO: 1761 - protein, 18 aa, synthetic construct
KMDAGHDSPHKSGQNQQT

SEQ ID NO: 1762 - protein, 18 aa, synthetic construct
KVEWGHDSPHKSGQNQQT

SEQ ID NO: 1763 - protein, 18 aa, synthetic construct
KAEQGHDSPHKSGQNQQT

SEQ ID NO: 1764 - protein, 18 aa, synthetic construct
KLEWGHDSPHKSGQNQQT

SEQ ID NO: 1765 - protein, 18 aa, synthetic construct
KTINGHPSPHYLGQNQQT

SEQ ID NO: 1766 - protein, 18 aa, synthetic construct
KTINGHLSPHYYGQNQQT

SEQ ID NO: 1767 - protein, 18 aa, synthetic construct
KMELGHDSPHKSGQNQQT

SEQ ID NO: 1768 - protein, 18 aa, synthetic construct
KMETGHDSPHKSGQNQQT

SEQ ID NO: 1769 - protein, 18 aa, synthetic construct
KMEAGHDSPHKSGQNQQT

SEQ ID NO: 1770 - protein, 18 aa, synthetic construct
KTINGHDSPHLLWQNQQT

SEQ ID NO: 1771 - protein, 18 aa, synthetic construct
KTINRQRSPHKSGQNQQT

SEQ ID NO: 1772 - protein, 18 aa, synthetic construct
KIESGHDSPHKSGQNQQT

SEQ ID NO: 1773 - protein, 18 aa, synthetic construct
KTAKDHDSPHKSGQNQQT

SEQ ID NO: 1774 - protein, 18 aa, synthetic construct
KMEVGHDSPHKSGQNQQT

SEQ ID NO: 1775 - protein, 18 aa, synthetic construct
KCEIGHDSPHKSGQNQQT

SEQ ID NO: 1776 - protein, 18 aa, synthetic construct
KATNGHDSPHKSGLNQQT

SEQ ID NO: 1777 - protein, 18 aa, synthetic construct
KMDGGHDSPHKSGQNQQT

SEQ ID NO: 1778 - protein, 18 aa, synthetic construct
KQEVGHDSPHKSGQNQQT

SEQ ID NO: 1779 - protein, 18 aa, synthetic construct
KADQGHDSPHKSGQNQQT

SEQ ID NO: 1780 - protein, 18 aa, synthetic construct
KTINGHESPHKSAQNHQT

SEQ ID NO: 1781 - protein, 18 aa, synthetic construct
KTINGHDSPHKSAQNQWT

SEQ ID NO: 1782 - protein, 18 aa, synthetic construct
KNMNGHDSPHKSGQNTHS

SEQ ID NO: 1783 - protein, 18 aa, synthetic construct
KTPWEHDSPHKSGQNQQT

SEQ ID NO: 1784 - protein, 18 aa, synthetic construct
KTINGHSSPHYFGQNQQT

SEQ ID NO: 1785 - protein, 18 aa, synthetic construct
KIEMGHDSPHKSGQNQQT

SEQ ID NO: 1786 - protein, 18 aa, synthetic construct
KTANEHDSPHKSGQNQQT

SEQ ID NO: 1787 - protein, 18 aa, synthetic construct
KTINGHDSPHKSGRRRQT

SEQ ID NO: 1788 - protein, 18 aa, synthetic construct
KISNGHDSPHKSAQNQQT

SEQ ID NO: 1789 - protein, 18 aa, synthetic construct
KTGNGHDSPHKSGQYQQT

SEQ ID NO: 1790 - protein, 18 aa, synthetic construct
KTINGHYSPHLFGQNQQT

SEQ ID NO: 1791 - protein, 18 aa, synthetic construct
KTINGNYSPHKIGQNQQT

SEQ ID NO: 1792 - protein, 18 aa, synthetic construct
KTINGHDSPHKSRQNDQT

SEQ ID NO: 1793 - protein, 18 aa, synthetic construct
KQQQGHDSPHKSGQNQQT

SEQ ID NO: 1794 - protein, 18 aa, synthetic construct
KTPQDHDSPHKSGQNQQT

SEQ ID NO: 1795 - protein, 18 aa, synthetic construct
KHDWGHDSPHKSGQNQQT

SEQ ID NO: 1796 - protein, 18 aa, synthetic construct
KIEGGHDSPHKSGQNQQT

SEQ ID NO: 1797-1799 - skipped (3 entries)

SEQ ID NO: 1800 - protein, 13 aa, synthetic construct
GHDSPHKSGQNQQ

SEQ ID NO: 1801 - protein, 13 aa, synthetic construct
GSGSPHSKAQNQQ

SEQ ID NO: 1802 - protein, 13 aa, synthetic construct
GSGSPHSKAQNRH

SEQ ID NO: 1803 - protein, 13 aa, synthetic construct
GSGSPHSKVQNQQ

SEQ ID NO: 1804 - protein, 13 aa, synthetic construct
MSGSPHSKAQNQQ

SEQ ID NO: 1805 - protein, 13 aa, synthetic construct
GRGSPHSKAQNQQ

SEQ ID NO: 1806 - protein, 13 aa, synthetic construct
RNGSPHSKAQNQQ

SEQ ID NO: 1807 - protein, 13 aa, synthetic construct
GSGSPHSKARDQQ

SEQ ID NO: 1808 - protein, 13 aa, synthetic construct
GSGSPHSKAPNLQ

SEQ ID NO: 1809 - protein, 13 aa, synthetic construct
TSGSPHSKAQNQQ

SEQ ID NO: 1810 - protein, 13 aa, synthetic construct
GSGSPHSKAHVRQ

SEQ ID NO: 1811 - protein, 13 aa, synthetic construct
GSGSPHSKAPNQH

SEQ ID NO: 1812 - protein, 13 aa, synthetic construct
ISGSPHSKAQNQQ

SEQ ID NO: 1813 - protein, 13 aa, synthetic construct
GPGSPHSKAHNQQ

SEQ ID NO: 1814 - protein, 13 aa, synthetic construct
GSGSPHSKTQSQQ

SEQ ID NO: 1815 - protein, 13 aa, synthetic construct
ESGSPHSKAQNQQ

SEQ ID NO: 1816 - protein, 13 aa, synthetic construct
GSGSPHSKAQPAK

SEQ ID NO: 1817 - protein, 13 aa, synthetic construct
SSGSPHSKAQNQQ

SEQ ID NO: 1818 - protein, 13 aa, synthetic construct
GNGSPHSKAQNQQ

SEQ ID NO: 1819 - protein, 13 aa, synthetic construct
GSGSPHSKSQTQQ

SEQ ID NO: 1820 - protein, 13 aa, synthetic construct
ASGSPHSKAQNQQ

SEQ ID NO: 1821 - protein, 13 aa, synthetic construct
GSGSPHSKAQNLA

SEQ ID NO: 1822 - protein, 13 aa, synthetic construct
GSGSPHSKSQNQL

SEQ ID NO: 1823 - protein, 13 aa, synthetic construct
NSGSPHSKAQNQQ

SEQ ID NO: 1824 - protein, 13 aa, synthetic construct
GSGSPHSKAQGQQ

SEQ ID NO: 1825 - protein, 13 aa, synthetic construct
VSGSPHSKAQNQQ

SEQ ID NO: 1826 - protein, 13 aa, synthetic construct
GSGSPHSKALNRQ

SEQ ID NO: 1827 - protein, 13 aa, synthetic construct
LSGSPHSKAQNQQ

SEQ ID NO: 1828 - protein, 13 aa, synthetic construct
GSGSPHSKAHNQQ

SEQ ID NO: 1829 - protein, 13 aa, synthetic construct
GSGSPHSKTQNQQ

SEQ ID NO: 1830 - protein, 13 aa, synthetic construct
GGGSPHSKAQTQQ

SEQ ID NO: 1831 - protein, 13 aa, synthetic construct
GSGSPHSKAQNPP

SEQ ID NO: 1832 - protein, 13 aa, synthetic construct
GSGSPHSKAQNLQ

SEQ ID NO: 1833 - protein, 13 aa, synthetic construct
GGGSPHSKAQNQQ

SEQ ID NO: 1834 - protein, 13 aa, synthetic construct
GSGSPHSKAQYQQ

SEQ ID NO: 1835 - protein, 13 aa, synthetic construct
GGGSPHSKAQNKQ

SEQ ID NO: 1836 - protein, 13 aa, synthetic construct
GSGSPHSKAQDQE

SEQ ID NO: 1837 - protein, 13 aa, synthetic construct
KSGSPHSKAQNQQ

SEQ ID NO: 1838 - protein, 13 aa, synthetic construct
GGGSPHSKAQNQL

SEQ ID NO: 1839 - protein, 13 aa, synthetic construct
GSGSPHSKAQNHQ

SEQ ID NO: 1840 - protein, 13 aa, synthetic construct
GSGSPHSKAQDQQ

SEQ ID NO: 1841 - protein, 13 aa, synthetic construct
GGGSPHSKSQNQL

SEQ ID NO: 1842 - protein, 13 aa, synthetic construct
GNGSPHSKAQNKQ

SEQ ID NO: 1843 - protein, 13 aa, synthetic construct
GSGSPHSKGHWQQ

SEQ ID NO: 1844 - protein, 13 aa, synthetic construct
GSGSPHSKAPNQQ

SEQ ID NO: 1845 - protein, 13 aa, synthetic construct
GSGSPHSKAQNQL

SEQ ID NO: 1846 - protein, 13 aa, synthetic construct
GSGSPHSKRPEQQ

SEQ ID NO: 1847 - protein, 13 aa, synthetic construct
GSGSPHSKAQRTM

SEQ ID NO: 1848 - protein, 13 aa, synthetic construct
GNGSPHSKAQNQH

SEQ ID NO: 1849 - protein, 13 aa, synthetic construct
HSGSPHSKAQNQQ

SEQ ID NO: 1850 - protein, 13 aa, synthetic construct
GGGSPHSKALNQQ

SEQ ID NO: 1851 - protein, 13 aa, synthetic construct
GSGSPHSKALHQH

SEQ ID NO: 1852 - protein, 13 aa, synthetic construct
GTGSPHSKAQNHQ

SEQ ID NO: 1853 - protein, 13 aa, synthetic construct
GSGSPHSKAQHRI

SEQ ID NO: 1854 - protein, 13 aa, synthetic construct
GSGSPHSKAQYIH

SEQ ID NO: 1855 - protein, 13 aa, synthetic construct
GGGSPHSKAHNQQ

SEQ ID NO: 1856 - protein, 13 aa, synthetic construct
GSGSPHSKAQKFE

SEQ ID NO: 1857 - protein, 13 aa, synthetic construct
ESGSPHSKAQNHQ

SEQ ID NO: 1858 - protein, 13 aa, synthetic construct
GSGSPHSKAQFPS

SEQ ID NO: 1859 - protein, 13 aa, synthetic construct
PSGSPHSKAQNQQ

SEQ ID NO: 1860 - protein, 13 aa, synthetic construct
GNGSPHSKAQNPL

SEQ ID NO: 1861 - protein, 13 aa, synthetic construct
GGGSPHSKAQSQQ

SEQ ID NO: 1862 - protein, 13 aa, synthetic construct
GSGSPHSKAQAIK

SEQ ID NO: 1863 - protein, 13 aa, synthetic construct
GSGSPHSKGQNRQ

SEQ ID NO: 1864 - protein, 13 aa, synthetic construct
GSGSPHSKAQSQQ

SEQ ID NO: 1865 - protein, 13 aa, synthetic construct
GSVSPHGKAQNQL

SEQ ID NO: 1866 - protein, 13 aa, synthetic construct
ASGSPHSKAQNQL

SEQ ID NO: 1867 - protein, 13 aa, synthetic construct
RSGSPHSKAQNQQ

SEQ ID NO: 1868 - protein, 13 aa, synthetic construct
GSGSPHSKAQYQH

SEQ ID NO: 1869 - protein, 13 aa, synthetic construct
GSGSPHTKAQNPQ

SEQ ID NO: 1870 - protein, 13 aa, synthetic construct
GSGSPHSKGQNPP

SEQ ID NO: 1871 - protein, 13 aa, synthetic construct
GSGSPHSKAQHQL

SEQ ID NO: 1872 - protein, 13 aa, synthetic construct
GSGSPHSKAQSPP

SEQ ID NO: 1873 - protein, 13 aa, synthetic construct
GSGSPHSKAQAKL

SEQ ID NO: 1874 - protein, 13 aa, synthetic construct
GSGSPHSKTKSQQ

SEQ ID NO: 1875 - protein, 13 aa, synthetic construct
GSGSPHSKAQDRP

SEQ ID NO: 1876 - protein, 13 aa, synthetic construct
GIGSPHSKAQNLG

SEQ ID NO: 1877 - protein, 13 aa, synthetic construct
GSGSPHSKAQAFH

SEQ ID NO: 1878 - protein, 13 aa, synthetic construct
GSGSPHSKAQKQQ

SEQ ID NO: 1879 - protein, 13 aa, synthetic construct
GSGSPHSKAQNAQ

SEQ ID NO: 1880 - protein, 13 aa, synthetic construct
WSGSPHSKAQNQQ

SEQ ID NO: 1881 - protein, 13 aa, synthetic construct
GSGSPHSKAHNQL

SEQ ID NO: 1882 - protein, 13 aa, synthetic construct
GNGSPHSKAQNHQ

SEQ ID NO: 1883 - protein, 13 aa, synthetic construct
GGGSPHSKAQNLQ

SEQ ID NO: 1884 - protein, 13 aa, synthetic construct
GSGSPHSKAQKLN

SEQ ID NO: 1885 - protein, 13 aa, synthetic construct
GGGSPHSKSQNQH

SEQ ID NO: 1886 - protein, 13 aa, synthetic construct
GSGSPHSKSQNVQ

SEQ ID NO: 1887 - protein, 13 aa, synthetic construct
GSGSPHSKAQAQQ

SEQ ID NO: 1888 - protein, 13 aa, synthetic construct
DSGSPHSKAQNQQ

SEQ ID NO: 1889 - protein, 13 aa, synthetic construct
ASGSPHSKAPNQQ

SEQ ID NO: 1890 - protein, 13 aa, synthetic construct
GSGSPHSKAQTPP

SEQ ID NO: 1891 - protein, 13 aa, synthetic construct
IDGSPHSKAQNQQ

SEQ ID NO: 1892 - protein, 13 aa, synthetic construct
GSGSPHNKAQNHQ

SEQ ID NO: 1893 - protein, 13 aa, synthetic construct
GSGSPHSKAQPPA

SEQ ID NO: 1894 - protein, 13 aa, synthetic construct
GSGSPHSKAQERP

SEQ ID NO: 1895 - protein, 13 aa, synthetic construct
GSGSPHSKAQDLQ

SEQ ID NO: 1896 - protein, 13 aa, synthetic construct
GGGSPHSKAQNPP

SEQ ID NO: 1897 - protein, 13 aa, synthetic construct
GSGSPHSKAQAMH

SEQ ID NO: 1898 - protein, 13 aa, synthetic construct
GSGSPHSKALNQQ

SEQ ID NO: 1899 - protein, 13 aa, synthetic construct
GSGSPHSKAQHPS

SEQ ID NO: 1900 - protein, 13 aa, synthetic construct
GLGSPHSKSQNQQ

SEQ ID NO: 1901 - protein, 13 aa, synthetic construct
GTGSPHSKAQNQQ

SEQ ID NO: 1902 - protein, 13 aa, synthetic construct
GSGSPHSKAPGLQ

SEQ ID NO: 1903 - protein, 13 aa, synthetic construct
GSGSPHSKAQGIR

SEQ ID NO: 1904 - protein, 13 aa, synthetic construct
GSGSPHSKAQAPA

SEQ ID NO: 1905 - protein, 13 aa, synthetic construct
GSGSPHSKSQSQQ

SEQ ID NO: 1906 - protein, 13 aa, synthetic construct
GSGSPHSKAQIPP

SEQ ID NO: 1907 - protein, 13 aa, synthetic construct
GSGSPHSKAQTQL

SEQ ID NO: 1908 - protein, 13 aa, synthetic construct
GSGSPHSKAQAPS

SEQ ID NO: 1909 - protein, 13 aa, synthetic construct
DAGSPHSKAQNQQ

SEQ ID NO: 1910 - protein, 13 aa, synthetic construct
GSGSPHSKGQNQQ

SEQ ID NO: 1911 - protein, 13 aa, synthetic construct
DGGSPHSKAQNQQ

SEQ ID NO: 1912 - protein, 13 aa, synthetic construct
ASGSPHSKAHNQQ

SEQ ID NO: 1913 - protein, 13 aa, synthetic construct
GSGSPHSKAQNTY

SEQ ID NO: 1914 - protein, 13 aa, synthetic construct
GSGSPHSKSQNQH

SEQ ID NO: 1915 - protein, 13 aa, synthetic construct
GGGSPHSKAQDKQ

SEQ ID NO: 1916 - protein, 13 aa, synthetic construct
GSGSPHSKAQNHL

SEQ ID NO: 1917 - protein, 13 aa, synthetic construct
GSGSPHSKAQIGM

SEQ ID NO: 1918 - protein, 13 aa, synthetic construct
GSGSPHSKALNKQ

SEQ ID NO: 1919 - protein, 13 aa, synthetic construct
GGGSPHSKAQNPQ

SEQ ID NO: 1920 - protein, 13 aa, synthetic construct
GTGSPHSKAPNQL

SEQ ID NO: 1921 - protein, 13 aa, synthetic construct
GSGSPHSKAQLQQ

SEQ ID NO: 1922 - protein, 13 aa, synthetic construct
GGGSPHSKAQYQQ

SEQ ID NO: 1923 - protein, 13 aa, synthetic construct
GGGSPHSKAQHQQ

SEQ ID NO: 1924 - protein, 13 aa, synthetic construct
GSGSPHSKAQRMS

SEQ ID NO: 1925 - protein, 13 aa, synthetic construct
GSGSPHSKAQGIL

SEQ ID NO: 1926 - protein, 13 aa, synthetic construct
GSGSPHSKAQDRQ

SEQ ID NO: 1927 - protein, 13 aa, synthetic construct
GSGSPHSKARDWQ

SEQ ID NO: 1928 - protein, 13 aa, synthetic construct
GSGSPHSKAQNTH

SEQ ID NO: 1929 - protein, 13 aa, synthetic construct
GSGSPHSKAQERS

SEQ ID NO: 1930 - protein, 13 aa, synthetic construct
GSGSPHSKAQNYQ

SEQ ID NO: 1931 - protein, 13 aa, synthetic construct
GSGSPHSKAQRTC

SEQ ID NO: 1932 - protein, 13 aa, synthetic construct
GSGSPHSKAQIGH

SEQ ID NO: 1933 - protein, 13 aa, synthetic construct
GSGSPHSKAQGAI

SEQ ID NO: 1934 - protein, 13 aa, synthetic construct
GSGSPHSKAQVPP

SEQ ID NO: 1935 - protein, 13 aa, synthetic construct
GSGSPHSKAQVQQ

SEQ ID NO: 1936 - protein, 13 aa, synthetic construct
GSGSPHSKALMRQ

SEQ ID NO: 1937 - protein, 13 aa, synthetic construct
GSGSPHSKAQYSV

SEQ ID NO: 1938 - protein, 13 aa, synthetic construct
GSGSPHSKVPNLQ

SEQ ID NO: 1939 - protein, 13 aa, synthetic construct
GSGSPHSKAQAIT

SEQ ID NO: 1940 - protein, 13 aa, synthetic construct
GSGSPHSKAQKTL

SEQ ID NO: 1941 - protein, 13 aa, synthetic construct
GSGSPHSKAQNQW

SEQ ID NO: 1942 - protein, 13 aa, synthetic construct
GSGSPHSKAQLHH

SEQ ID NO: 1943 - protein, 13 aa, synthetic construct
GSGSPHSKAQNII

SEQ ID NO: 1944 - protein, 13 aa, synthetic construct
MEGSPHSKAQNQQ

SEQ ID NO: 1945 - protein, 13 aa, synthetic construct
GSGSPHSKAQGHH

SEQ ID NO: 1946 - protein, 13 aa, synthetic construct
GSGSPHSKAQSKV

SEQ ID NO: 1947 - protein, 13 aa, synthetic construct
GSGSPHSKAQLPS

SEQ ID NO: 1948 - protein, 13 aa, synthetic construct
GSGSPHSKAIGKQ

SEQ ID NO: 1949 - protein, 13 aa, synthetic construct
GGGSPHSKSQNQQ

SEQ ID NO: 1950 - protein, 13 aa, synthetic construct
GSGSPHSKAQAIH

SEQ ID NO: 1951 - protein, 13 aa, synthetic construct
GSGSPHSKAQHGL

SEQ ID NO: 1952 - protein, 13 aa, synthetic construct
GSGSPHSKAQFMC

SEQ ID NO: 1953 - protein, 13 aa, synthetic construct
VSGSPHSKAQGQQ

SEQ ID NO: 1954 - protein, 13 aa, synthetic construct
GGGSPHSKAQNQM

SEQ ID NO: 1955 - protein, 13 aa, synthetic construct
GSGSPHSKAQHLQ

SEQ ID NO: 1956 - protein, 13 aa, synthetic construct
ENGSPHSKAQNQQ

SEQ ID NO: 1957 - protein, 13 aa, synthetic construct
GSGSPHSKTQNHQ

SEQ ID NO: 1958 - protein, 13 aa, synthetic construct
GSGSPHSKAQPAR

SEQ ID NO: 1959 - protein, 13 aa, synthetic construct
GSGSPHSKAQSLQ

SEQ ID NO: 1960 - protein, 13 aa, synthetic construct
GSGSPHSKSQSQL

SEQ ID NO: 1961 - protein, 13 aa, synthetic construct
GSASPHSKAHSQQ

SEQ ID NO: 1962 - protein, 13 aa, synthetic construct
GSGSPHSKAQMPS

SEQ ID NO: 1963 - protein, 13 aa, synthetic construct
GSGSPHSKAQGSL

SEQ ID NO: 1964 - protein, 13 aa, synthetic construct
GSGSPHSKSQNQQ

SEQ ID NO: 1965 - protein, 13 aa, synthetic construct
GNGSPHSKSQNQQ

SEQ ID NO: 1966 - protein, 13 aa, synthetic construct
GSGSPHSKAQVPA

SEQ ID NO: 1967 - protein, 13 aa, synthetic construct
GNGSPHSKAQNLQ

SEQ ID NO: 1968 - protein, 13 aa, synthetic construct
GSGSPHSKAQDKQ

SEQ ID NO: 1969 - protein, 13 aa, synthetic construct
GSGSPHSKAHYQQ

SEQ ID NO: 1970 - protein, 13 aa, synthetic construct
GSGSPHSKAQVPS

SEQ ID NO: 1971 - protein, 13 aa, synthetic construct
GGGSPHSKAQNHQ

SEQ ID NO: 1972 - protein, 13 aa, synthetic construct
GSGSPHSKARGEQ

SEQ ID NO: 1973 - protein, 13 aa, synthetic construct
GGGSPHSKAQYQH

SEQ ID NO: 1974 - protein, 13 aa, synthetic construct
GSGSPHSKAPGQQ

SEQ ID NO: 1975 - protein, 13 aa, synthetic construct
KNGSPHSKAQNQQ

SEQ ID NO: 1976 - protein, 13 aa, synthetic construct
GSGSPHSKRLEQQ

SEQ ID NO: 1977 - protein, 13 aa, synthetic construct
GSGSPHSKAQNQS

SEQ ID NO: 1978 - protein, 13 aa, synthetic construct
GSGSPHSKAQKVI

SEQ ID NO: 1979 - protein, 13 aa, synthetic construct
GSGSPHSKAQNND

SEQ ID NO: 1980 - protein, 13 aa, synthetic construct
GSGSPHSKAQSVH

SEQ ID NO: 1981 - protein, 13 aa, synthetic construct
GSGSPHSKAQPLG

SEQ ID NO: 1982 - protein, 13 aa, synthetic construct
KEGSPHSKAQNQQ

SEQ ID NO: 1983 - protein, 13 aa, synthetic construct
GSGSPHSKAHNQE

SEQ ID NO: 1984 - protein, 13 aa, synthetic construct
GSGSPHSKAQIQQ

SEQ ID NO: 1985 - protein, 13 aa, synthetic construct
GSGSPHSKAQVRN

SEQ ID NO: 1986 - protein, 13 aa, synthetic construct
GSGSPHSKAPSNQ

SEQ ID NO: 1987 - protein, 13 aa, synthetic construct
GSGSPHSKAQVGH

SEQ ID NO: 1988 - protein, 13 aa, synthetic construct
GSGSPHSKAQRDI

SEQ ID NO: 1989 - protein, 13 aa, synthetic construct
GSGSPHSKAQMPN

SEQ ID NO: 1990 - protein, 13 aa, synthetic construct
AIGSPHSKAQNQQ

SEQ ID NO: 1991 - protein, 13 aa, synthetic construct
GSGSPHSKARGLQ

SEQ ID NO: 1992 - protein, 13 aa, synthetic construct
GSGSPHSKLQKQQ

SEQ ID NO: 1993 - protein, 13 aa, synthetic construct
GSGSPHSKAPSLQ

SEQ ID NO: 1994 - protein, 13 aa, synthetic construct
GSGSPHSKAQRDQ

SEQ ID NO: 1995 - protein, 13 aa, synthetic construct
GSGSPHSKNRDQQ

SEQ ID NO: 1996 - protein, 13 aa, synthetic construct
GSGSPHSKAQAKG

SEQ ID NO: 1997 - protein, 13 aa, synthetic construct
GSGSPHSKAQSAH

SEQ ID NO: 1998 - protein, 13 aa, synthetic construct
GNGSPHSKSQNQH

SEQ ID NO: 1999 - protein, 13 aa, synthetic construct
GSGSPHSKSQNHQ

SEQ ID NO: 2000 - protein, 13 aa, synthetic construct
RSGSPHSKAQDQQ

SEQ ID NO: 2001 - protein, 13 aa, synthetic construct
GSGSPHSKAQSTM

SEQ ID NO: 2002 - protein, 13 aa, synthetic construct
GSGSPHSKAQREM

SEQ ID NO: 2003 - protein, 13 aa, synthetic construct
GGGSPHSKSQNRQ

SEQ ID NO: 2004 - protein, 13 aa, synthetic construct
GSGSPHSKAQYRA

SEQ ID NO: 2005 - protein, 13 aa, synthetic construct
GGGSPHSKAQRQQ

SEQ ID NO: 2006 - protein, 13 aa, synthetic construct
GSGSPHSKNQWQQ

SEQ ID NO: 2007 - protein, 13 aa, synthetic construct
GSGSPHSKAQRMN

SEQ ID NO: 2008 - protein, 13 aa, synthetic construct
GSGSPHAKAQNHQ

SEQ ID NO: 2009 - protein, 13 aa, synthetic construct
GSGSPHSKAGDSQ

SEQ ID NO: 2010 - protein, 13 aa, synthetic construct
GSGSPHSKLKSQQ

SEQ ID NO: 2011 - protein, 13 aa, synthetic construct
GSGSPHSKAQKIS

SEQ ID NO: 2012 - protein, 13 aa, synthetic construct
GSGSPHSKAPSMQ

SEQ ID NO: 2013 - protein, 13 aa, synthetic construct
GSGSPHSKASPRQ

SEQ ID NO: 2014 - protein, 13 aa, synthetic construct
GSGSPHSKRMEQQ

SEQ ID NO: 2015 - protein, 13 aa, synthetic construct
GSGSPHSKAQYQN

SEQ ID NO: 2016 - protein, 13 aa, synthetic construct
GSGSPHARMQNQQ

SEQ ID NO: 2017 - protein, 13 aa, synthetic construct
GSGSPHVKSQNQQ

SEQ ID NO: 2018 - protein, 13 aa, synthetic construct
GQDSPHKSGQNQQ

SEQ ID NO: 2019 - protein, 13 aa, synthetic construct
GSGSPHASRQNQQ

SEQ ID NO: 2020 - protein, 13 aa, synthetic construct
GSGSPHASRQNKQ

SEQ ID NO: 2021 - protein, 13 aa, synthetic construct
GSGSPHVKIQNQQ

SEQ ID NO: 2022 - protein, 13 aa, synthetic construct
GSGSPHSKAKNQQ

SEQ ID NO: 2023 - protein, 13 aa, synthetic construct
GSGSPHKKNQNQQ

SEQ ID NO: 2024 - protein, 13 aa, synthetic construct
GSGSPHVRMQNQQ

SEQ ID NO: 2025 - protein, 13 aa, synthetic construct
GSGSPHASRQKQQ

SEQ ID NO: 2026 - protein, 13 aa, synthetic construct
GHSSPHRSGQNQQ

SEQ ID NO: 2027 - protein, 13 aa, synthetic construct
GSGSPHTRGQNQQ

SEQ ID NO: 2028 - protein, 13 aa, synthetic construct
CSGSPHSKAQNQQ

SEQ ID NO: 2029 - protein, 13 aa, synthetic construct
GSGSPHRKAQNQQ

SEQ ID NO: 2030 - protein, 13 aa, synthetic construct
GSGSPHSKAQNKQ

SEQ ID NO: 2031 - protein, 13 aa, synthetic construct
GSGSPHSKAQTQQ

SEQ ID NO: 2032 - protein, 13 aa, synthetic construct
CSGSPHKTSQNQQ

SEQ ID NO: 2033 - protein, 13 aa, synthetic construct
CSHSPHKSGQNQQ

SEQ ID NO: 2034 - protein, 13 aa, synthetic construct
GQSSPHRSGQNQQ

SEQ ID NO: 2035 - protein, 13 aa, synthetic construct
GRGSPHASRQNQQ

SEQ ID NO: 2036 - protein, 13 aa, synthetic construct
GSGSPHASRKNQQ

SEQ ID NO: 2037 - protein, 13 aa, synthetic construct
GSGSPHASRQNQH

SEQ ID NO: 2038 - protein, 13 aa, synthetic construct
GSGSPHKFGKNQQ

SEQ ID NO: 2039 - protein, 13 aa, synthetic construct
GSGSPHKFGQKQQ

SEQ ID NO: 2040 - protein, 13 aa, synthetic construct
GSGSPHKFGQNQQ

SEQ ID NO: 2041 - protein, 13 aa, synthetic construct
GSGSPHKIGQNQQ

SEQ ID NO: 2042 - protein, 13 aa, synthetic construct
GSGSPHKLGQNQQ

SEQ ID NO: 2043 - protein, 13 aa, synthetic construct
GSGSPHKTSKNQQ

SEQ ID NO: 2044 - protein, 13 aa, synthetic construct
GSGSPHKTSQKQQ

SEQ ID NO: 2045 - protein, 13 aa, synthetic construct
GSGSPHKTSQNQQ

SEQ ID NO: 2046 - protein, 13 aa, synthetic construct
GSGSPHKTTQNQQ

SEQ ID NO: 2047 - protein, 13 aa, synthetic construct
GSGSPHKTYQNQQ

SEQ ID NO: 2048 - protein, 13 aa, synthetic construct
GSGSPHKYGQNQQ

SEQ ID NO: 2049 - protein, 13 aa, synthetic construct
GSGSPHSKAQHQQ

SEQ ID NO: 2050 - protein, 13 aa, synthetic construct
GSGSPHSKDQNQQ

SEQ ID NO: 2051 - protein, 13 aa, synthetic construct
GSGSPHSKPQNQQ

SEQ ID NO: 2052 - protein, 13 aa, synthetic construct
GSGSPHVRGQKQQ

SEQ ID NO: 2053 - protein, 13 aa, synthetic construct
GSGSPHVRGQNKQ

SEQ ID NO: 2054 - protein, 13 aa, synthetic construct
GSHSPHKRGQNQQ

SEQ ID NO: 2055 - protein, 13 aa, synthetic construct
GSHSPHKSGQKQQ

SEQ ID NO: 2056 - protein, 13 aa, synthetic construct
GSHSPHKSGQNQQ

SEQ ID NO: 2057 - protein, 13 aa, synthetic construct
VSGSPHASRQNQQ

SEQ ID NO: 2058 - protein, 13 aa, synthetic construct
VSGSPHGARQNQQ

SEQ ID NO: 2059 - protein, 13 aa, synthetic construct
VSGSPHKFGQNQQ

SEQ ID NO: 2060 - protein, 13 aa, synthetic construct
GSGSPHSKAQYYV

SEQ ID NO: 2061 - protein, 13 aa, synthetic construct
GSGSPHSKLRRQQ

SEQ ID NO: 2062 - protein, 13 aa, synthetic construct
GSGSPHSKAGCGQ

SEQ ID NO: 2063 - protein, 13 aa, synthetic construct
GSGSPHSRAQNQQ

SEQ ID NO: 2064 - protein, 13 aa, synthetic construct
GSGSPHSKRLRQQ

SEQ ID NO: 2065 - protein, 13 aa, synthetic construct
GSGSPHSLRRNQQ

SEQ ID NO: 2066 - protein, 13 aa, synthetic construct
GSGSPHSRGRNQQ

SEQ ID NO: 2067 - protein, 13 aa, synthetic construct
GSGSPHSSRRNQQ

SEQ ID NO: 2068 - protein, 13 aa, synthetic construct
GSGSPHSKAFRLQ

SEQ ID NO: 2069 - protein, 13 aa, synthetic construct
GSCSPHRKAQNQQ

SEQ ID NO: 2070 - protein, 13 aa, synthetic construct
GSGSPHFLRQNQQ

SEQ ID NO: 2071 - protein, 13 aa, synthetic construct
GSGSPHSLRFNQQ

SEQ ID NO: 2072 - protein, 13 aa, synthetic construct
GSGSPHSKWLLQQ

SEQ ID NO: 2073 - protein, 13 aa, synthetic construct
GSGSPHSKRRLQQ

SEQ ID NO: 2074 - protein, 13 aa, synthetic construct
GSGSPHSKAQRKL

SEQ ID NO: 2075 - protein, 13 aa, synthetic construct
GSGSPHSKALRRQ

SEQ ID NO: 2076 - protein, 13 aa, synthetic construct
GSGSPHSKAQRLR

SEQ ID NO: 2077 - protein, 13 aa, synthetic construct
GSGSPHSKAQRRL

SEQ ID NO: 2078 - protein, 13 aa, synthetic construct
GSGSPHSKARRQQ

SEQ ID NO: 2079 - protein, 13 aa, synthetic construct
GSGSPHSKARRLQ

SEQ ID NO: 2080 - protein, 13 aa, synthetic construct
GSGSPHSKSRRQQ

SEQ ID NO: 2081 - protein, 13 aa, synthetic construct
GLLSPHWKAQNQQ

SEQ ID NO: 2082 - protein, 13 aa, synthetic construct
GSGSPHSKARLRQ

SEQ ID NO: 2083 - protein, 13 aa, synthetic construct
GSGSPHSKASKRQ

SEQ ID NO: 2084 - protein, 13 aa, synthetic construct
GSGSPHVRRQNQQ

SEQ ID NO: 2085 - protein, 13 aa, synthetic construct
GSGSPHSKAQLYR

SEQ ID NO: 2086 - protein, 13 aa, synthetic construct
GSGSPHSKAQLTV

SEQ ID NO: 2087 - protein, 13 aa, synthetic construct
GHDSPHKRGQHRQ

SEQ ID NO: 2088 - protein, 13 aa, synthetic construct
GHDSPHKSGQKQQ

SEQ ID NO: 2089 - protein, 13 aa, synthetic construct
GHDSPHKSGLTQQ

SEQ ID NO: 2090 - protein, 13 aa, synthetic construct
GDDSPHKSGRNQQ

SEQ ID NO: 2091 - protein, 13 aa, synthetic construct
GHDSPHKSGLNQQ

SEQ ID NO: 2092 - protein, 13 aa, synthetic construct
GHESPHKSAQNHQ

SEQ ID NO: 2093 - protein, 13 aa, synthetic construct
GHDSPHKSAQNQW

SEQ ID NO: 2094 - protein, 13 aa, synthetic construct
GHDSPHKSGQNTH

SEQ ID NO: 2095 - protein, 13 aa, synthetic construct
GHDSPHKSGRRRQ

SEQ ID NO: 2096 - protein, 13 aa, synthetic construct
GHDSPHKSAQNQQ

SEQ ID NO: 2097 - protein, 13 aa, synthetic construct
GHDSPHKSGQYQQ

SEQ ID NO: 2098 - protein, 13 aa, synthetic construct
GNYSPHKIGQNQQ

SEQ ID NO: 2099 - protein, 13 aa, synthetic construct
GHDSPHKSRQNDQ

SEQ ID NO: 2100 - protein, 13 aa, synthetic construct
GHDSPHKSGQIRQ

SEQ ID NO: 2101 - protein, 13 aa, synthetic construct
GHDSPHKIGQNQH

SEQ ID NO: 2102 - protein, 13 aa, synthetic construct
GYDSPHKSGQKQQ

SEQ ID NO: 2103 - protein, 13 aa, synthetic construct
GHDSPHKSGQSVQ

SEQ ID NO: 2104 - protein, 13 aa, synthetic construct
GHESPHKSGRSQQ

SEQ ID NO: 2105 - protein, 13 aa, synthetic construct
GHDSPHKSGQNKL

SEQ ID NO: 2106 - protein, 13 aa, synthetic construct
GHDSPHKTGQNQQ

SEQ ID NO: 2107 - protein, 13 aa, synthetic construct
GRGSPHKRGQNQQ

SEQ ID NO: 2108 - protein, 13 aa, synthetic construct
GSGSPHTKAQNPP

SEQ ID NO: 2109 - protein, 13 aa, synthetic construct
GQDSPHKSGQHQQ

SEQ ID NO: 2110 - protein, 13 aa, synthetic construct
GHDSPHKSGQIQH

SEQ ID NO: 2111 - protein, 13 aa, synthetic construct
GHDSPHKSGPRQQ

SEQ ID NO: 2112 - protein, 13 aa, synthetic construct
GHDSPHKSGHTQQ

SEQ ID NO: 2113 - protein, 13 aa, synthetic construct
GHDSPHKSGQRQH

SEQ ID NO: 2114 - protein, 13 aa, synthetic construct
GSGSPHTKAQNQQ

SEQ ID NO: 2115 - protein, 13 aa, synthetic construct
GHDSPHKSAQSQQ

SEQ ID NO: 2116 - protein, 13 aa, synthetic construct
GHESPHKSGQNQQ

SEQ ID NO: 2117 - protein, 13 aa, synthetic construct
GHDSPHKSLQNQQ

SEQ ID NO: 2118 - protein, 13 aa, synthetic construct
GHGSPHSKAQNPQ

SEQ ID NO: 2119 - protein, 13 aa, synthetic construct
GHDSPHKSGRNQE

SEQ ID NO: 2120 - protein, 13 aa, synthetic construct
GHDSPHKSGQTQL

SEQ ID NO: 2121 - protein, 13 aa, synthetic construct
GHDSPHKSEKNQQ

SEQ ID NO: 2122 - protein, 13 aa, synthetic construct
GRDSPHKSGQDQQ

SEQ ID NO: 2123 - protein, 13 aa, synthetic construct
GHDSPHKTGHNQQ

SEQ ID NO: 2124 - protein, 13 aa, synthetic construct
GYDSPHKSGQTQQ

SEQ ID NO: 2125 - protein, 13 aa, synthetic construct
GHESPHKSGQTQQ

SEQ ID NO: 2126 - protein, 13 aa, synthetic construct
GHDSPHKSGQSKQ

SEQ ID NO: 2127 - protein, 13 aa, synthetic construct
GHDSPHKTGQNQP

SEQ ID NO: 2128 - protein, 13 aa, synthetic construct
GHDSPHKSGQSPQ

SEQ ID NO: 2129 - protein, 13 aa, synthetic construct
GNDSPHKSVQNQQ

SEQ ID NO: 2130 - protein, 13 aa, synthetic construct
GHDSPHKSAQNYQ

SEQ ID NO: 2131 - protein, 13 aa, synthetic construct
GSASPHSKALNQQ

SEQ ID NO: 2132 - protein, 13 aa, synthetic construct
GHESPHKSAQNRQ

SEQ ID NO: 2133 - protein, 13 aa, synthetic construct
GQDSPHKIGQNQQ

SEQ ID NO: 2134 - protein, 13 aa, synthetic construct
GHDSPHKSGQNHL

SEQ ID NO: 2135 - protein, 13 aa, synthetic construct
GHDSPHKSGQYQH

SEQ ID NO: 2136 - protein, 13 aa, synthetic construct
GNDSPHKSVQNHQ

SEQ ID NO: 2137 - protein, 13 aa, synthetic construct
GHDSPHKSGQNQW

SEQ ID NO: 2138 - protein, 13 aa, synthetic construct
GHDSPHKSVQNQH

SEQ ID NO: 2139 - protein, 13 aa, synthetic construct
GHDSPHKSGQNQH

SEQ ID NO: 2140 - protein, 13 aa, synthetic construct
GHDSPHKSGQTRQ

SEQ ID NO: 2141 - protein, 13 aa, synthetic construct
GHDSPHKSGQNLH

SEQ ID NO: 2142 - protein, 13 aa, synthetic construct
GHDSPHKSAQNQE

SEQ ID NO: 2143 - protein, 13 aa, synthetic construct
GHDSPHKSGQHLQ

SEQ ID NO: 2144 - protein, 13 aa, synthetic construct
GHDSPHKSRLNQP

SEQ ID NO: 2145 - protein, 13 aa, synthetic construct
GQDSPHKSGQNQD

SEQ ID NO: 2146 - protein, 13 aa, synthetic construct
GHDSPHKSGRNQQ

SEQ ID NO: 2147 - protein, 13 aa, synthetic construct
GHDSPHKSGQNLL

SEQ ID NO: 2148 - protein, 13 aa, synthetic construct
GHDSPHKSGQLVI

SEQ ID NO: 2149 - protein, 13 aa, synthetic construct
GHDSPHKSRQSQQ

SEQ ID NO: 2150 - protein, 13 aa, synthetic construct
GHDSPHKSGRTQE

SEQ ID NO: 2151 - protein, 13 aa, synthetic construct
GHDSPHKSVQTHQ

SEQ ID NO: 2152 - protein, 13 aa, synthetic construct
GHDSPHKSGQNQP

SEQ ID NO: 2153 - protein, 13 aa, synthetic construct
GHDSPHKSGQTQQ

SEQ ID NO: 2154 - protein, 13 aa, synthetic construct
GPDSPHKIGQNQQ

SEQ ID NO: 2155 - protein, 13 aa, synthetic construct
GHDSPHKSVQNQQ

SEQ ID NO: 2156 - protein, 13 aa, synthetic construct
GHDSPHKSRQDQH

SEQ ID NO: 2157 - protein, 13 aa, synthetic construct
GPDSPHKSGQKQQ

SEQ ID NO: 2158 - protein, 13 aa, synthetic construct
GHDSPHKSRQSQH

SEQ ID NO: 2159 - protein, 13 aa, synthetic construct
GHDSPHKSVQNQL

SEQ ID NO: 2160 - protein, 13 aa, synthetic construct
GYDSPHKSGQYQH

SEQ ID NO: 2161 - protein, 13 aa, synthetic construct
GHDSPHKSRQNQQ

SEQ ID NO: 2162 - protein, 13 aa, synthetic construct
GHDSPHKSWVRQQ

SEQ ID NO: 2163 - protein, 13 aa, synthetic construct
GHESPHKSGQNQH

SEQ ID NO: 2164 - protein, 13 aa, synthetic construct
GHDSPHKIGHNQQ

SEQ ID NO: 2165 - protein, 13 aa, synthetic construct
GHDSPHKSNAWQQ

SEQ ID NO: 2166 - protein, 13 aa, synthetic construct
GHDSPHKSGQSVP

SEQ ID NO: 2167 - protein, 13 aa, synthetic construct
GHESPHKSGQNIQ

SEQ ID NO: 2168 - protein, 13 aa, synthetic construct
GHDSPHKSVQNHL

SEQ ID NO: 2169 - protein, 13 aa, synthetic construct
GHDSPHKIGLDQQ

SEQ ID NO: 2170 - protein, 13 aa, synthetic construct
ASGSPHSKAQHQQ

SEQ ID NO: 2171 - protein, 13 aa, synthetic construct
GHDSPHKRGPDQQ

SEQ ID NO: 2172 - protein, 13 aa, synthetic construct
GMGSPHSKTQNQQ

SEQ ID NO: 2173 - protein, 13 aa, synthetic construct
GHDSPHKSGESQQ

SEQ ID NO: 2174 - protein, 13 aa, synthetic construct
GHDSPHKHGQNHQ

SEQ ID NO: 2175 - protein, 13 aa, synthetic construct
GTGSPHSKAQNQL

SEQ ID NO: 2176 - protein, 13 aa, synthetic construct
GHDSPHKSVQNKQ

SEQ ID NO: 2177 - protein, 13 aa, synthetic construct
GQVSPHKSGQNQQ

SEQ ID NO: 2178 - protein, 13 aa, synthetic construct
GHDSPHKSGQRQL

SEQ ID NO: 2179 - protein, 13 aa, synthetic construct
GHDSPHKIGQNQL

SEQ ID NO: 2180 - protein, 13 aa, synthetic construct
GHDSPHKSGQIIV

SEQ ID NO: 2181 - protein, 13 aa, synthetic construct
GYDSPHKSGQKQS

SEQ ID NO: 2182 - protein, 13 aa, synthetic construct
GNGSPHSKAQNQE

SEQ ID NO: 2183 - protein, 13 aa, synthetic construct
GDDSPHKSVQNQQ

SEQ ID NO: 2184 - protein, 13 aa, synthetic construct
GHDSPHKSVQSHQ

SEQ ID NO: 2185 - protein, 13 aa, synthetic construct
GHDSPHKSGQFVV

SEQ ID NO: 2186 - protein, 13 aa, synthetic construct
GHDSPHKSRQNLQ

SEQ ID NO: 2187 - protein, 13 aa, synthetic construct
GHNSPHKSGQNQE

SEQ ID NO: 2188 - protein, 13 aa, synthetic construct
GHDSPHKSGQSQP

SEQ ID NO: 2189 - protein, 13 aa, synthetic construct
GHESPHKSGQNEQ

SEQ ID NO: 2190 - protein, 13 aa, synthetic construct
GHDSPHKSGQNQL

SEQ ID NO: 2191 - protein, 13 aa, synthetic construct
GHDSPHKSAQNLL

SEQ ID NO: 2192 - protein, 13 aa, synthetic construct
ASGSPHSKAINQQ

SEQ ID NO: 2193 - protein, 13 aa, synthetic construct
GNGSPHKRGQNQQ

SEQ ID NO: 2194 - protein, 13 aa, synthetic construct
GHDSPHKSGQSLQ

SEQ ID NO: 2195 - protein, 13 aa, synthetic construct
GHDSPHKSAQNHQ

SEQ ID NO: 2196 - protein, 13 aa, synthetic construct
GHDSPHKSGRNRQ

SEQ ID NO: 2197 - protein, 13 aa, synthetic construct
GHDSPHKYGQNEQ

SEQ ID NO: 2198 - protein, 13 aa, synthetic construct
GNGSPHSKAPNLQ

SEQ ID NO: 2199 - protein, 13 aa, synthetic construct
GHDSPHKSQQNQQ

SEQ ID NO: 2200 - protein, 13 aa, synthetic construct
GHDSPHKSVQSKQ

SEQ ID NO: 2201 - protein, 13 aa, synthetic construct
GNDSPHKIGHNQQ

SEQ ID NO: 2202 - protein, 13 aa, synthetic construct
GGGSPHSKAQDQQ

SEQ ID NO: 2203 - protein, 13 aa, synthetic construct
GQDSPHKSGQNPL

SEQ ID NO: 2204 - protein, 13 aa, synthetic construct
ASGSPHSKAQNHQ

SEQ ID NO: 2205 - protein, 13 aa, synthetic construct
GHDSPHKSGRDQK

SEQ ID NO: 2206 - protein, 13 aa, synthetic construct
GHDSPHKSVHNQQ

SEQ ID NO: 2207 - protein, 13 aa, synthetic construct
GHDSPHKSGQWKR

SEQ ID NO: 2208 - protein, 13 aa, synthetic construct
GSGSPHSKAENRQ

SEQ ID NO: 2209 - protein, 13 aa, synthetic construct
GHDSPHKSGQSQQ

SEQ ID NO: 2210 - protein, 13 aa, synthetic construct
GHDSPHKSRQAQQ

SEQ ID NO: 2211 - protein, 13 aa, synthetic construct
GHDSPHKSVQNHQ

SEQ ID NO: 2212 - protein, 13 aa, synthetic construct
GHDSPHKSKQNQQ

SEQ ID NO: 2213 - protein, 13 aa, synthetic construct
GHDSPHKSAQNQL

SEQ ID NO: 2214 - protein, 13 aa, synthetic construct
GHDSPHKSGQTQP

SEQ ID NO: 2215 - protein, 13 aa, synthetic construct
GHDSPHKLWINQQ

SEQ ID NO: 2216 - protein, 13 aa, synthetic construct
GPDSPHKSGQNQQ

SEQ ID NO: 2217 - protein, 13 aa, synthetic construct
GHDSPHKSVQKQL

SEQ ID NO: 2218 - protein, 13 aa, synthetic construct
GHPSPHWKGQNQQ

SEQ ID NO: 2219 - protein, 13 aa, synthetic construct
GHDSPHKSGRNQL

SEQ ID NO: 2220 - protein, 13 aa, synthetic construct
GSGSPHSKVQDQQ

SEQ ID NO: 2221 - protein, 13 aa, synthetic construct
GHDSPHKMGRNQQ

SEQ ID NO: 2222 - protein, 13 aa, synthetic construct
GHDSPHKSGISIQ

SEQ ID NO: 2223 - protein, 13 aa, synthetic construct
GHDSPHKSVQNLQ

SEQ ID NO: 2224 - protein, 13 aa, synthetic construct
GHDSPHKMAHNQQ

SEQ ID NO: 2225 - protein, 13 aa, synthetic construct
GHDSPHKHGQNQQ

SEQ ID NO: 2226 - protein, 13 aa, synthetic construct
GHDSPHKSVQSQQ

SEQ ID NO: 2227 - protein, 13 aa, synthetic construct
GHDSPHKSGQTVC

SEQ ID NO: 2228 - protein, 13 aa, synthetic construct
GQDSPHKSGQYQQ

SEQ ID NO: 2229 - protein, 13 aa, synthetic construct
GHDSPHKSGQQIM

SEQ ID NO: 2230 - protein, 13 aa, synthetic construct
GHDSPHKSRQNEQ

SEQ ID NO: 2231 - protein, 13 aa, synthetic construct
GHDSPHKSGLNHQ

SEQ ID NO: 2232 - protein, 13 aa, synthetic construct
GYDSPHKSGQNQQ

SEQ ID NO: 2233 - protein, 13 aa, synthetic construct
GHDSPHKSGQNLQ

SEQ ID NO: 2234 - protein, 13 aa, synthetic construct
GHDSPHKSRQDQQ

SEQ ID NO: 2235 - protein, 13 aa, synthetic construct
GDDSPHKSGQKQL

SEQ ID NO: 2236 - protein, 13 aa, synthetic construct
GSGSPHSKAQNQA

SEQ ID NO: 2237 - protein, 13 aa, synthetic construct
GDDSPHKSGHNQQ

SEQ ID NO: 2238 - protein, 13 aa, synthetic construct
GHDSPHKSGQMIH

SEQ ID NO: 2239 - protein, 13 aa, synthetic construct
GHDSPHKSGRNHQ

SEQ ID NO: 2240 - protein, 13 aa, synthetic construct
GHDSPHKSVQNRQ

SEQ ID NO: 2241 - protein, 13 aa, synthetic construct
GHDSPHKSGQKMN

SEQ ID NO: 2242 - protein, 16 aa, synthetic construct
TINGSGSPHSKAQNQQ

SEQ ID NO: 2243 - protein, 16 aa, synthetic construct
TINGHDSPHKSGQNQQ

SEQ ID NO: 2244 - protein, 16 aa, synthetic construct
TIIGSGSPHSKAQNRH

SEQ ID NO: 2245 - protein, 16 aa, synthetic construct
TFPGSGSPHSKVQNQQ

SEQ ID NO: 2246 - protein, 16 aa, synthetic construct
TEKMSGSPHSKAQNQQ

SEQ ID NO: 2247 - protein, 16 aa, synthetic construct
EINGRGSPHSKAQNQQ

SEQ ID NO: 2248 - protein, 16 aa, synthetic construct
TVNRNGSPHSKAQNQQ

SEQ ID NO: 2249 - protein, 16 aa, synthetic construct
TVNGSGSPHSKARDQQ

SEQ ID NO: 2250 - protein, 16 aa, synthetic construct
TFNGSGSPHSKAPNLQ

SEQ ID NO: 2251 - protein, 16 aa, synthetic construct
TEKTSGSPHSKAQNQQ

SEQ ID NO: 2252 - protein, 16 aa, synthetic construct
TINGSGSPHSKAHVRQ

SEQ ID NO: 2253 - protein, 16 aa, synthetic construct
TVNGSGSPHSKAPNQH

SEQ ID NO: 2254 - protein, 16 aa, synthetic construct
TEKISGSPHSKAQNQQ

SEQ ID NO: 2255 - protein, 16 aa, synthetic construct
TINGPGSPHSKAHNQQ

SEQ ID NO: 2256 - protein, 16 aa, synthetic construct
TVNGSGSPHSKTQSQQ

SEQ ID NO: 2257 - protein, 16 aa, synthetic construct
SINESGSPHSKAQNQQ

SEQ ID NO: 2258 - protein, 16 aa, synthetic construct
TERTSGSPHSKAQNQQ

SEQ ID NO: 2259 - protein, 16 aa, synthetic construct
TINGSGSPHSKAQPAK

SEQ ID NO: 2260 - protein, 16 aa, synthetic construct
TEKSSGSPHSKAQNQQ

SEQ ID NO: 2261 - protein, 16 aa, synthetic construct
TSYGNGSPHSKAQNQQ

SEQ ID NO: 2262 - protein, 16 aa, synthetic construct
TEKGSGSPHSKAQNQQ

SEQ ID NO: 2263 - protein, 16 aa, synthetic construct
TINGSGSPHSKSQTQQ

SEQ ID NO: 2264 - protein, 16 aa, synthetic construct
TERISGSPHSKAQNQQ

SEQ ID NO: 2265 - protein, 16 aa, synthetic construct
TERASGSPHSKAQNQQ

SEQ ID NO: 2266 - protein, 16 aa, synthetic construct
ELHGSGSPHSKAQNQQ

SEQ ID NO: 2267 - protein, 16 aa, synthetic construct
AINGSGSPHSKAQNLA

SEQ ID NO: 2268 - protein, 16 aa, synthetic construct
TVNGSGSPHSKSQNQL

SEQ ID NO: 2269 - protein, 16 aa, synthetic construct
TERNSGSPHSKAQNQQ

SEQ ID NO: 2270 - protein, 16 aa, synthetic construct
SVNGNGSPHSKAQNQQ

SEQ ID NO: 2271 - protein, 16 aa, synthetic construct
TFNGSGSPHSKAQGQQ

SEQ ID NO: 2272 - protein, 16 aa, synthetic construct
TERVSGSPHSKAQNQQ

SEQ ID NO: 2273 - protein, 16 aa, synthetic construct
TINGSGSPHSKALNRQ

SEQ ID NO: 2274 - protein, 16 aa, synthetic construct
TERLSGSPHSKAQNQQ

SEQ ID NO: 2275 - protein, 16 aa, synthetic construct
TDNGSGSPHSKAHNQQ

SEQ ID NO: 2276 - protein, 16 aa, synthetic construct
TFHGSGSPHSKTQNQQ

SEQ ID NO: 2277 - protein, 16 aa, synthetic construct
TINGGGSPHSKAQTQQ

SEQ ID NO: 2278 - protein, 16 aa, synthetic construct
TSNGSGSPHSKAQNPP

SEQ ID NO: 2279 - protein, 16 aa, synthetic construct
TINGSGSPHSKAQNLQ

SEQ ID NO: 2280 - protein, 16 aa, synthetic construct
TVHGNGSPHSKAQNQQ

SEQ ID NO: 2281 - protein, 16 aa, synthetic construct
TINGGGSPHSKAQNQQ

SEQ ID NO: 2282 - protein, 16 aa, synthetic construct
TENMSGSPHSKAQNQQ

SEQ ID NO: 2283 - protein, 16 aa, synthetic construct
TENVSGSPHSKAQNQQ

SEQ ID NO: 2284 - protein, 16 aa, synthetic construct
TSSGSGSPHSKAQYQQ

SEQ ID NO: 2285 - protein, 16 aa, synthetic construct
TIDGGGSPHSKAQNKQ

SEQ ID NO: 2286 - protein, 16 aa, synthetic construct
TEKVSGSPHSKAQNQQ

SEQ ID NO: 2287 - protein, 16 aa, synthetic construct
AINGSGSPHSKAQDQE

SEQ ID NO: 2288 - protein, 16 aa, synthetic construct
TCNKSGSPHSKAQNQQ

SEQ ID NO: 2289 - protein, 16 aa, synthetic construct
TINGGGSPHSKAQNQL

SEQ ID NO: 2290 - protein, 16 aa, synthetic construct
NINGGGSPHSKAQNQQ

SEQ ID NO: 2291 - protein, 16 aa, synthetic construct
TEHLSGSPHSKAQNQQ

SEQ ID NO: 2292 - protein, 16 aa, synthetic construct
AEMGSGSPHSKAQNQQ

SEQ ID NO: 2293 - protein, 16 aa, synthetic construct
ATNGSGSPHSKAQNHQ

SEQ ID NO: 2294 - protein, 16 aa, synthetic construct
AIKGSGSPHSKAQDQQ

SEQ ID NO: 2295 - protein, 16 aa, synthetic construct
TINGGGSPHSKSQNQL

SEQ ID NO: 2296 - protein, 16 aa, synthetic construct
TVNGNGSPHSKAQNKQ

SEQ ID NO: 2297 - protein, 16 aa, synthetic construct
TINGSGSPHSKGHWQQ

SEQ ID NO: 2298 - protein, 16 aa, synthetic construct
TDKTSGSPHSKAQNQQ

SEQ ID NO: 2299 - protein, 16 aa, synthetic construct
TFKGSGSPHSKAPNQQ

SEQ ID NO: 2300 - protein, 16 aa, synthetic construct
TVNGSGSPHSKAQNQL

SEQ ID NO: 2301 - protein, 16 aa, synthetic construct
TINGSGSPHSKRPEQQ

SEQ ID NO: 2302 - protein, 16 aa, synthetic construct
TINGSGSPHSKAQRTM

SEQ ID NO: 2303 - protein, 16 aa, synthetic construct
TEKASGSPHSKAQNQQ

SEQ ID NO: 2304 - protein, 16 aa, synthetic construct
SDQGSGSPHSKAQNQQ

SEQ ID NO: 2305 - protein, 16 aa, synthetic construct
TEITSGSPHSKAQNQQ

SEQ ID NO: 2306 - protein, 16 aa, synthetic construct
TDKSSGSPHSKAQNQQ

SEQ ID NO: 2307 - protein, 16 aa, synthetic construct
TIDGSGSPHSKAQNQQ

SEQ ID NO: 2308 - protein, 16 aa, synthetic construct
TVNGNGSPHSKAQNQH

SEQ ID NO: 2309 - protein, 16 aa, synthetic construct
NTNGSGSPHSKAQNQQ

SEQ ID NO: 2310 - protein, 16 aa, synthetic construct
TETHSGSPHSKAQNQQ

SEQ ID NO: 2311 - protein, 16 aa, synthetic construct
TINGGGSPHSKALNQQ

SEQ ID NO: 2312 - protein, 16 aa, synthetic construct
TINGSGSPHSKALHQH

SEQ ID NO: 2313 - protein, 16 aa, synthetic construct
TINGTGSPHSKAQNHQ

SEQ ID NO: 2314 - protein, 16 aa, synthetic construct
TINGSGSPHSKAQHRI

SEQ ID NO: 2315 - protein, 16 aa, synthetic construct
TINGSGSPHSKAQYIH

SEQ ID NO: 2316 - protein, 16 aa, synthetic construct
TENISGSPHSKAQNQQ

SEQ ID NO: 2317 - protein, 16 aa, synthetic construct
TIIGGGSPHSKAHNQQ

SEQ ID NO: 2318 - protein, 16 aa, synthetic construct
TINGSGSPHSKAQKFE

SEQ ID NO: 2319 - protein, 16 aa, synthetic construct
TSNESGSPHSKAQNHQ

SEQ ID NO: 2320 - protein, 16 aa, synthetic construct
TINGSGSPHSKAQFPS

SEQ ID NO: 2321 - protein, 16 aa, synthetic construct
TERPSGSPHSKAQNQQ

SEQ ID NO: 2322 - protein, 16 aa, synthetic construct
TINGNGSPHSKAQNPL

SEQ ID NO: 2323 - protein, 16 aa, synthetic construct
SIKGNGSPHSKAQNQQ

SEQ ID NO: 2324 - protein, 16 aa, synthetic construct
TERMSGSPHSKAQNQQ

SEQ ID NO: 2325 - protein, 16 aa, synthetic construct
TERSSGSPHSKAQNQQ

SEQ ID NO: 2326 - protein, 16 aa, synthetic construct
TELHSGSPHSKAQNQQ

SEQ ID NO: 2327 - protein, 16 aa, synthetic construct
TELTSGSPHSKAQNQQ

SEQ ID NO: 2328 - protein, 16 aa, synthetic construct
TINGSGSPHSKAHNQQ

SEQ ID NO: 2329 - protein, 16 aa, synthetic construct
TINGGGSPHSKAQSQQ

SEQ ID NO: 2330 - protein, 16 aa, synthetic construct
TINGSGSPHSKAQAIK

SEQ ID NO: 2331 - protein, 16 aa, synthetic construct
TENTSGSPHSKAQNQQ

SEQ ID NO: 2332 - protein, 16 aa, synthetic construct
TIDGSGSPHSKGQNRQ

SEQ ID NO: 2333 - protein, 16 aa, synthetic construct
NINGSGSPHSKAQSQQ

SEQ ID NO: 2334 - protein, 16 aa, synthetic construct
TINGSVSPHGKAQNQL

SEQ ID NO: 2335 - protein, 16 aa, synthetic construct
TSNASGSPHSKAQNQL

SEQ ID NO: 2336 - protein, 16 aa, synthetic construct
TEARSGSPHSKAQNQQ

SEQ ID NO: 2337 - protein, 16 aa, synthetic construct
TEKNSGSPHSKAQNQQ

SEQ ID NO: 2338 - protein, 16 aa, synthetic construct
TANGSGSPHSKAQYQQ

SEQ ID NO: 2339 - protein, 16 aa, synthetic construct
TVNGSGSPHSKAQYQH

SEQ ID NO: 2340 - protein, 16 aa, synthetic construct
TINGSGSPHTKAQNPQ

SEQ ID NO: 2341 - protein, 16 aa, synthetic construct
TINGSGSPHSKGQNPP

SEQ ID NO: 2342 - protein, 16 aa, synthetic construct
TIIGSGSPHSKAQHQL

SEQ ID NO: 2343 - protein, 16 aa, synthetic construct
TINGSGSPHSKAQSPP

SEQ ID NO: 2344 - protein, 16 aa, synthetic construct
TIYGSGSPHSKAQNQQ

SEQ ID NO: 2345 - protein, 16 aa, synthetic construct
TINGSGSPHSKAQAKL

SEQ ID NO: 2346 - protein, 16 aa, synthetic construct
TDKNSGSPHSKAQNQQ

SEQ ID NO: 2347 - protein, 16 aa, synthetic construct
TINGSGSPHSKTKSQQ

SEQ ID NO: 2348 - protein, 16 aa, synthetic construct
TINGSGSPHSKAQDRP

SEQ ID NO: 2349 - protein, 16 aa, synthetic construct
TINGIGSPHSKAQNLG

SEQ ID NO: 2350 - protein, 16 aa, synthetic construct
TINGSGSPHSKAQSQQ

SEQ ID NO: 2351 - protein, 16 aa, synthetic construct
TENLSGSPHSKAQNQQ

SEQ ID NO: 2352 - protein, 16 aa, synthetic construct
TINGSGSPHSKAQAFH

SEQ ID NO: 2353 - protein, 16 aa, synthetic construct
TINGSGSPHSKAQKQQ

SEQ ID NO: 2354 - protein, 16 aa, synthetic construct
TFSGSGSPHSKAQNLQ

SEQ ID NO: 2355 - protein, 16 aa, synthetic construct
AINGSGSPHSKAQNAQ

SEQ ID NO: 2356 - protein, 16 aa, synthetic construct
TESWSGSPHSKAQNQQ

SEQ ID NO: 2357 - protein, 16 aa, synthetic construct
TTNGSGSPHSKAHNQL

SEQ ID NO: 2358 - protein, 16 aa, synthetic construct
TVNGNGSPHSKAQNHQ

SEQ ID NO: 2359 - protein, 16 aa, synthetic construct
TEDKSGSPHSKAQNQQ

SEQ ID NO: 2360 - protein, 16 aa, synthetic construct
TESASGSPHSKAQNQQ

SEQ ID NO: 2361 - protein, 16 aa, synthetic construct
TNNGSGSPHSKAQNQQ

SEQ ID NO: 2362 - protein, 16 aa, synthetic construct
TSNGGGSPHSKAQNLQ

SEQ ID NO: 2363 - protein, 16 aa, synthetic construct
TDKMSGSPHSKAQNQQ

SEQ ID NO: 2364 - protein, 16 aa, synthetic construct
EVHGSGSPHSKAQNQQ

SEQ ID NO: 2365 - protein, 16 aa, synthetic construct
TINGSGSPHSKAQKLN

SEQ ID NO: 2366 - protein, 16 aa, synthetic construct
TINGGGSPHSKSQNQH

SEQ ID NO: 2367 - protein, 16 aa, synthetic construct
TVNGGGSPHSKAQSQQ

SEQ ID NO: 2368 - protein, 16 aa, synthetic construct
TTNGSGSPHSKAQYQH

SEQ ID NO: 2369 - protein, 16 aa, synthetic construct
TISGSGSPHSKAQYQH

SEQ ID NO: 2370 - protein, 16 aa, synthetic construct
TESTSGSPHSKAQNQQ

SEQ ID NO: 2371 - protein, 16 aa, synthetic construct
TINGSGSPHSKSQNVQ

SEQ ID NO: 2372 - protein, 16 aa, synthetic construct
SINGSGSPHSKAQAQQ

SEQ ID NO: 2373 - protein, 16 aa, synthetic construct
TVNGSGSPHSKAQNLQ

SEQ ID NO: 2374 - protein, 16 aa, synthetic construct
TVRDSGSPHSKAQNQQ

SEQ ID NO: 2375 - protein, 16 aa, synthetic construct
TFNASGSPHSKAPNQQ

SEQ ID NO: 2376 - protein, 16 aa, synthetic construct
TDRMSGSPHSKAQNQQ

SEQ ID NO: 2377 - protein, 16 aa, synthetic construct
TINGSGSPHSKAQTPP

SEQ ID NO: 2378 - protein, 16 aa, synthetic construct
TIKGSGSPHSKAQNQQ

SEQ ID NO: 2379 - protein, 16 aa, synthetic construct
NHIGSGSPHSKAQNQQ

SEQ ID NO: 2380 - protein, 16 aa, synthetic construct
TINGSGSPHSKAQYQH

SEQ ID NO: 2381 - protein, 16 aa, synthetic construct
TIPIDGSPHSKAQNQQ

SEQ ID NO: 2382 - protein, 16 aa, synthetic construct
TINGSGSPHSKAQGQQ

SEQ ID NO: 2383 - protein, 16 aa, synthetic construct
TFNGSGSPHNKAQNHQ

SEQ ID NO: 2384 - protein, 16 aa, synthetic construct
ESDGSGSPHSKAQNQQ

SEQ ID NO: 2385 - protein, 16 aa, synthetic construct
TINGSGSPHSKAQPPA

SEQ ID NO: 2386 - protein, 16 aa, synthetic construct
TINGSGSPHSKAQERP

SEQ ID NO: 2387 - protein, 16 aa, synthetic construct
TIKGSGSPHSKAQDLQ

SEQ ID NO: 2388 - protein, 16 aa, synthetic construct
TDLKSGSPHSKAQNQQ

SEQ ID NO: 2389 - protein, 16 aa, synthetic construct
TINGGGSPHSKAQNPP

SEQ ID NO: 2390 - protein, 16 aa, synthetic construct
TINGSGSPHSKAQAMH

SEQ ID NO: 2391 - protein, 16 aa, synthetic construct
TVPNSGSPHSKAQNQQ

SEQ ID NO: 2392 - protein, 16 aa, synthetic construct
TVIGSGSPHSKALNQQ

SEQ ID NO: 2393 - protein, 16 aa, synthetic construct
TINGSGSPHSKAQHPS

SEQ ID NO: 2394 - protein, 16 aa, synthetic construct
TINGLGSPHSKSQNQQ

SEQ ID NO: 2395 - protein, 16 aa, synthetic construct
TINGTGSPHSKAQNQQ

SEQ ID NO: 2396 - protein, 16 aa, synthetic construct
TINGSGSPHSKAPGLQ

SEQ ID NO: 2397 - protein, 16 aa, synthetic construct
TINGSGSPHSKAQGIR

SEQ ID NO: 2398 - protein, 16 aa, synthetic construct
TESHSGSPHSKAQNQQ

SEQ ID NO: 2399 - protein, 16 aa, synthetic construct
TINGSGSPHSKAQAPA

SEQ ID NO: 2400 - protein, 16 aa, synthetic construct
TINGSGSPHSKSQSQQ

SEQ ID NO: 2401 - protein, 16 aa, synthetic construct
AEHGSGSPHSKAQNQQ

SEQ ID NO: 2402 - protein, 16 aa, synthetic construct
TEDRSGSPHSKAQNQQ

SEQ ID NO: 2403 - protein, 16 aa, synthetic construct
NCLGSGSPHSKAQNQQ

SEQ ID NO: 2404 - protein, 16 aa, synthetic construct
TDRGSGSPHSKAQNQQ

SEQ ID NO: 2405 - protein, 16 aa, synthetic construct
TINGSGSPHSKAQIPP

SEQ ID NO: 2406 - protein, 16 aa, synthetic construct
TVKGSGSPHSKAQDQQ

SEQ ID NO: 2407 - protein, 16 aa, synthetic construct
NADGSGSPHSKAQNQQ

SEQ ID NO: 2408 - protein, 16 aa, synthetic construct
TDKVSGSPHSKAQNQQ

SEQ ID NO: 2409 - protein, 16 aa, synthetic construct
TITGSGSPHSKAQTQL

SEQ ID NO: 2410 - protein, 16 aa, synthetic construct
TINGSGSPHSKAQAPS

SEQ ID NO: 2411 - protein, 16 aa, synthetic construct
NCVGSGSPHSKAQNQQ

SEQ ID NO: 2412 - protein, 16 aa, synthetic construct
TIRDAGSPHSKAQNQQ

SEQ ID NO: 2413 - protein, 16 aa, synthetic construct
TVKDSGSPHSKAQNQQ

SEQ ID NO: 2414 - protein, 16 aa, synthetic construct
NALGSGSPHSKAQNQQ

SEQ ID NO: 2415 - protein, 16 aa, synthetic construct
VINGSGSPHSKGQNQQ

SEQ ID NO: 2416 - protein, 16 aa, synthetic construct
TVNGGGSPHSKAQNQQ

SEQ ID NO: 2417 - protein, 16 aa, synthetic construct
TIQDGGSPHSKAQNQQ

SEQ ID NO: 2418 - protein, 16 aa, synthetic construct
TISGGGSPHSKAQNQQ

SEQ ID NO: 2419 - protein, 16 aa, synthetic construct
TSNASGSPHSKAHNQQ

SEQ ID NO: 2420 - protein, 16 aa, synthetic construct
TINGSGSPHSKAQNTY

SEQ ID NO: 2421 - protein, 16 aa, synthetic construct
TINGSGSPHSKSQNQH

SEQ ID NO: 2422 - protein, 16 aa, synthetic construct
TINGGGSPHSKAQDKQ

SEQ ID NO: 2423 - protein, 16 aa, synthetic construct
TEFVSGSPHSKAQNQQ

SEQ ID NO: 2424 - protein, 16 aa, synthetic construct
TVNGSGSPHSKAQNHL

SEQ ID NO: 2425 - protein, 16 aa, synthetic construct
TREISGSPHSKAQNQQ

SEQ ID NO: 2426 - protein, 16 aa, synthetic construct
TINGSGSPHSKAQIGM

SEQ ID NO: 2427 - protein, 16 aa, synthetic construct
TIDGSGSPHSKALNKQ

SEQ ID NO: 2428 - protein, 16 aa, synthetic construct
TIIGGGSPHSKAQNPQ

SEQ ID NO: 2429 - protein, 16 aa, synthetic construct
QGEGSGSPHSKAQNQQ

SEQ ID NO: 2430 - protein, 16 aa, synthetic construct
TINGTGSPHSKAPNQL

SEQ ID NO: 2431 - protein, 16 aa, synthetic construct
TVNGSGSPHSKAQLQQ

SEQ ID NO: 2432 - protein, 16 aa, synthetic construct
TFNGGGSPHSKAQYQQ

SEQ ID NO: 2433 - protein, 16 aa, synthetic construct
SINGSGSPHSKTQSQQ

SEQ ID NO: 2434 - protein, 16 aa, synthetic construct
TVNGGGSPHSKAQHQQ

SEQ ID NO: 2435 - protein, 16 aa, synthetic construct
SEKGSGSPHSKAQNQQ

SEQ ID NO: 2436 - protein, 16 aa, synthetic construct
NVNGSGSPHSKAQNQQ

SEQ ID NO: 2437 - protein, 16 aa, synthetic construct
GGEGSGSPHSKAQNQQ

SEQ ID NO: 2438 - protein, 16 aa, synthetic construct
TINGSGSPHSKAQRMS

SEQ ID NO: 2439 - protein, 16 aa, synthetic construct
TINGSGSPHSKAQGIL

SEQ ID NO: 2440 - protein, 16 aa, synthetic construct
EFVGSGSPHSKAQNQQ

SEQ ID NO: 2441 - protein, 16 aa, synthetic construct
TIIGSGSPHSKAQDRQ

SEQ ID NO: 2442 - protein, 16 aa, synthetic construct
SDKGSGSPHSKAQNQQ

SEQ ID NO: 2443 - protein, 16 aa, synthetic construct
TEQVSGSPHSKAQNQQ

SEQ ID NO: 2444 - protein, 16 aa, synthetic construct
TEHVSGSPHSKAQNQQ

SEQ ID NO: 2445 - protein, 16 aa, synthetic construct
TINGSGSPHSKARDWQ

SEQ ID NO: 2446 - protein, 16 aa, synthetic construct
TENASGSPHSKAQNQQ

SEQ ID NO: 2447 - protein, 16 aa, synthetic construct
EVQGSGSPHSKAQNQQ

SEQ ID NO: 2448 - protein, 16 aa, synthetic construct
TINGSGSPHSKAQNTH

SEQ ID NO: 2449 - protein, 16 aa, synthetic construct
TINGSGSPHSKAPNLQ

SEQ ID NO: 2450 - protein, 16 aa, synthetic construct
TINGSGSPHSKAQERS

SEQ ID NO: 2451 - protein, 16 aa, synthetic construct
TSNGSGSPHSKAQNYQ

SEQ ID NO: 2452 - protein, 16 aa, synthetic construct
TEYISGSPHSKAQNQQ

SEQ ID NO: 2453 - protein, 16 aa, synthetic construct
TINGSGSPHSKAQRTC

SEQ ID NO: 2454 - protein, 16 aa, synthetic construct
TINGSGSPHSKAQIGH

SEQ ID NO: 2455 - protein, 16 aa, synthetic construct
NCWGSGSPHSKAQNQQ

SEQ ID NO: 2456 - protein, 16 aa, synthetic construct
TINGSGSPHSKAQGAI

SEQ ID NO: 2457 - protein, 16 aa, synthetic construct
TDVNSGSPHSKAQNQQ

SEQ ID NO: 2458 - protein, 16 aa, synthetic construct
SDIGSGSPHSKAQNQQ

SEQ ID NO: 2459 - protein, 16 aa, synthetic construct
TINGSGSPHSKAQVPP

SEQ ID NO: 2460 - protein, 16 aa, synthetic construct
TINGSGSPHSKAQVQQ

SEQ ID NO: 2461 - protein, 16 aa, synthetic construct
TINGSGSPHSKALMRQ

SEQ ID NO: 2462 - protein, 16 aa, synthetic construct
TINGSGSPHSKAQYSV

SEQ ID NO: 2463 - protein, 16 aa, synthetic construct
NSIGSGSPHSKAQNQQ

SEQ ID NO: 2464 - protein, 16 aa, synthetic construct
TINGSGSPHSKVPNLQ

SEQ ID NO: 2465 - protein, 16 aa, synthetic construct
AINGSGSPHSKAQSQQ

SEQ ID NO: 2466 - protein, 16 aa, synthetic construct
TINGSGSPHSKAQAIT

SEQ ID NO: 2467 - protein, 16 aa, synthetic construct
TINGSGSPHSKAQKTL

SEQ ID NO: 2468 - protein, 16 aa, synthetic construct
TVNGSGSPHSKAQNQW

SEQ ID NO: 2469 - protein, 16 aa, synthetic construct
TINGSGSPHSKAQLHH

SEQ ID NO: 2470 - protein, 16 aa, synthetic construct
TEQTSGSPHSKAQNQQ

SEQ ID NO: 2471 - protein, 16 aa, synthetic construct
TINGSGSPHSKAQNII

SEQ ID NO: 2472 - protein, 16 aa, synthetic construct
NSLGSGSPHSKAQNQQ

SEQ ID NO: 2473 - protein, 16 aa, synthetic construct
TIPMEGSPHSKAQNQQ

SEQ ID NO: 2474 - protein, 16 aa, synthetic construct
TINGSGSPHSKAQGHH

SEQ ID NO: 2475 - protein, 16 aa, synthetic construct
TDRTSGSPHSKAQNQQ

SEQ ID NO: 2476 - protein, 16 aa, synthetic construct
TINGSGSPHSKAQSKV

SEQ ID NO: 2477 - protein, 16 aa, synthetic construct
EVVGSGSPHSKAQNQQ

SEQ ID NO: 2478 - protein, 16 aa, synthetic construct
TINGSGSPHSKAQLPS

SEQ ID NO: 2479 - protein, 16 aa, synthetic construct
TINGSGSPHSKAIGKQ

SEQ ID NO: 2480 - protein, 16 aa, synthetic construct
TEPTSGSPHSKAQNQQ

SEQ ID NO: 2481 - protein, 16 aa, synthetic construct
TVNGGGSPHSKSQNQQ

SEQ ID NO: 2482 - protein, 16 aa, synthetic construct
TINGSGSPHSKAQAIH

SEQ ID NO: 2483 - protein, 16 aa, synthetic construct
TINGSGSPHSKAQHGL

SEQ ID NO: 2484 - protein, 16 aa, synthetic construct
SELGSGSPHSKAQNQQ

SEQ ID NO: 2485 - protein, 16 aa, synthetic construct
TINGSGSPHSKAQFMC

SEQ ID NO: 2486 - protein, 16 aa, synthetic construct
TINVSGSPHSKAQGQQ

SEQ ID NO: 2487 - protein, 16 aa, synthetic construct
TINGGGSPHSKAQNQM

SEQ ID NO: 2488 - protein, 16 aa, synthetic construct
TVNGSGSPHSKAQHLQ

SEQ ID NO: 2489 - protein, 16 aa, synthetic construct
TIRENGSPHSKAQNQQ

SEQ ID NO: 2490 - protein, 16 aa, synthetic construct
TINGSGSPHSKTQNHQ

SEQ ID NO: 2491 - protein, 16 aa, synthetic construct
TINGSGSPHSKAQPAR

SEQ ID NO: 2492 - protein, 16 aa, synthetic construct
TVNGSGSPHSKAQSLQ

SEQ ID NO: 2493 - protein, 16 aa, synthetic construct
TINGSGSPHSKSQSQL

SEQ ID NO: 2494 - protein, 16 aa, synthetic construct
TINGSASPHSKAHSQQ

SEQ ID NO: 2495 - protein, 16 aa, synthetic construct
TWQNSGSPHSKAQNQQ

SEQ ID NO: 2496 - protein, 16 aa, synthetic construct
TINGSGSPHSKAQDRQ

SEQ ID NO: 2497 - protein, 16 aa, synthetic construct
TINGSGSPHSKAQMPS

SEQ ID NO: 2498 - protein, 16 aa, synthetic construct
TNNGGGSPHSKAQNLQ

SEQ ID NO: 2499 - protein, 16 aa, synthetic construct
TINGSGSPHSKAQGSL

SEQ ID NO: 2500 - protein, 16 aa, synthetic construct
TEVTSGSPHSKAQNQQ

SEQ ID NO: 2501 - protein, 16 aa, synthetic construct
SINGGGSPHSKAQYQQ

SEQ ID NO: 2502 - protein, 16 aa, synthetic construct
TVIGSGSPHSKSQNQQ

SEQ ID NO: 2503 - protein, 16 aa, synthetic construct
AVNVSGSPHSKAQNQQ

SEQ ID NO: 2504 - protein, 16 aa, synthetic construct
TVNGNGSPHSKSQNQQ

SEQ ID NO: 2505 - protein, 16 aa, synthetic construct
TDRNSGSPHSKAQNQQ

SEQ ID NO: 2506 - protein, 16 aa, synthetic construct
TINGSGSPHSKAQVPA

SEQ ID NO: 2507 - protein, 16 aa, synthetic construct
GVLGSGSPHSKAQNQQ

SEQ ID NO: 2508 - protein, 16 aa, synthetic construct
TLNGNGSPHSKAQNLQ

SEQ ID NO: 2509 - protein, 16 aa, synthetic construct
AINGSGSPHSKAQDKQ

SEQ ID NO: 2510 - protein, 16 aa, synthetic construct
TSNGSGSPHSKAHYQQ

SEQ ID NO: 2511 - protein, 16 aa, synthetic construct
TINGSGSPHSKAQVPS

SEQ ID NO: 2512 - protein, 16 aa, synthetic construct
TELRSGSPHSKAQNQQ

SEQ ID NO: 2513 - protein, 16 aa, synthetic construct
NINGSGSPHSKAQNHQ

SEQ ID NO: 2514 - protein, 16 aa, synthetic construct
TVNGGGSPHSKAQNHQ

SEQ ID NO: 2515 - protein, 16 aa, synthetic construct
TINGSGSPHSKARGEQ

SEQ ID NO: 2516 - protein, 16 aa, synthetic construct
TINGGGSPHSKAQYQH

SEQ ID NO: 2517 - protein, 16 aa, synthetic construct
TEDLSGSPHSKAQNQQ

SEQ ID NO: 2518 - protein, 16 aa, synthetic construct
TINGSGSPHSKAPGQQ

SEQ ID NO: 2519 - protein, 16 aa, synthetic construct
TIPKNGSPHSKAQNQQ

SEQ ID NO: 2520 - protein, 16 aa, synthetic construct
TINGSGSPHSKAQSLQ

SEQ ID NO: 2521 - protein, 16 aa, synthetic construct
TINGSGSPHSKRLEQQ

SEQ ID NO: 2522 - protein, 16 aa, synthetic construct
TERGSGSPHSKAQNQQ

SEQ ID NO: 2523 - protein, 16 aa, synthetic construct
TVNGSGSPHSKAPNQQ

SEQ ID NO: 2524 - protein, 16 aa, synthetic construct
TSNGSGSPHSKAQNQS

SEQ ID NO: 2525 - protein, 16 aa, synthetic construct
TINGSGSPHSKAQKVI

SEQ ID NO: 2526 - protein, 16 aa, synthetic construct
TEGISGSPHSKAQNQQ

SEQ ID NO: 2527 - protein, 16 aa, synthetic construct
TINGSGSPHSKAQNND

SEQ ID NO: 2528 - protein, 16 aa, synthetic construct
TINGSGSPHSKAQSVH

SEQ ID NO: 2529 - protein, 16 aa, synthetic construct
TINGSGSPHSKAQPLG

SEQ ID NO: 2530 - protein, 16 aa, synthetic construct
TINKEGSPHSKAQNQQ

SEQ ID NO: 2531 - protein, 16 aa, synthetic construct
TCNASGSPHSKAQNQQ

SEQ ID NO: 2532 - protein, 16 aa, synthetic construct
AINGSGSPHSKAHNQE

SEQ ID NO: 2533 - protein, 16 aa, synthetic construct
TEGLSGSPHSKAQNQQ

SEQ ID NO: 2534 - protein, 16 aa, synthetic construct
TRDASGSPHSKAQNQQ

SEQ ID NO: 2535 - protein, 16 aa, synthetic construct
TSNGSGSPHSKAQNLQ

SEQ ID NO: 2536 - protein, 16 aa, synthetic construct
TGNGSGSPHSKAQIQQ

SEQ ID NO: 2537 - protein, 16 aa, synthetic construct
TVNGGGSPHSKAQNLQ

SEQ ID NO: 2538 - protein, 16 aa, synthetic construct
TDRSSGSPHSKAQNQQ

SEQ ID NO: 2539 - protein, 16 aa, synthetic construct
TINGSGSPHSKAQVRN

SEQ ID NO: 2540 - protein, 16 aa, synthetic construct
TINGSGSPHSKAPSNQ

SEQ ID NO: 2541 - protein, 16 aa, synthetic construct
TINGSGSPHSKAQVGH

SEQ ID NO: 2542 - protein, 16 aa, synthetic construct
NAIGSGSPHSKAQNQQ

SEQ ID NO: 2543 - protein, 16 aa, synthetic construct
AENGSGSPHSKAQNQQ

SEQ ID NO: 2544 - protein, 16 aa, synthetic construct
TINGSGSPHSKAQRDI

SEQ ID NO: 2545 - protein, 16 aa, synthetic construct
TINGSGSPHSKAQMPN

SEQ ID NO: 2546 - protein, 16 aa, synthetic construct
TVNGSGSPHSKSQNQQ

SEQ ID NO: 2547 - protein, 16 aa, synthetic construct
TIPAIGSPHSKAQNQQ

SEQ ID NO: 2548 - protein, 16 aa, synthetic construct
TINGSGSPHSKARGLQ

SEQ ID NO: 2549 - protein, 16 aa, synthetic construct
TELGSGSPHSKAQNQQ

SEQ ID NO: 2550 - protein, 16 aa, synthetic construct
AETGSGSPHSKAQNQQ

SEQ ID NO: 2551 - protein, 16 aa, synthetic construct
TINGSGSPHSKLQKQQ

SEQ ID NO: 2552 - protein, 16 aa, synthetic construct
TINGSGSPHSKAPSLQ

SEQ ID NO: 2553 - protein, 16 aa, synthetic construct
TINGSGSPHSKAQRDQ

SEQ ID NO: 2554 - protein, 16 aa, synthetic construct
TDVGSGSPHSKAQNQQ

SEQ ID NO: 2555 - protein, 16 aa, synthetic construct
TINGSGSPHSKNRDQQ

SEQ ID NO: 2556 - protein, 16 aa, synthetic construct
SINGSGSPHSKAPNLQ

SEQ ID NO: 2557 - protein, 16 aa, synthetic construct
TINGSGSPHSKAQAKG

SEQ ID NO: 2558 - protein, 16 aa, synthetic construct
TVNGSGSPHSKAQDKQ

SEQ ID NO: 2559 - protein, 16 aa, synthetic construct
TINGGGSPHSKAQNPQ

SEQ ID NO: 2560 - protein, 16 aa, synthetic construct
TINGSGSPHSKAQSAH

SEQ ID NO: 2561 - protein, 16 aa, synthetic construct
TINGNGSPHSKSQNQH

SEQ ID NO: 2562 - protein, 16 aa, synthetic construct
TVPTSGSPHSKAQNQQ

SEQ ID NO: 2563 - protein, 16 aa, synthetic construct
TIDGSGSPHSKSQNHQ

SEQ ID NO: 2564 - protein, 16 aa, synthetic construct
TDVKSGSPHSKAQNQQ

SEQ ID NO: 2565 - protein, 16 aa, synthetic construct
AINRSGSPHSKAQDQQ

SEQ ID NO: 2566 - protein, 16 aa, synthetic construct
TINGSGSPHSKAQSTM

SEQ ID NO: 2567 - protein, 16 aa, synthetic construct
TVNASGSPHSKAQNQL

SEQ ID NO: 2568 - protein, 16 aa, synthetic construct
TINGSGSPHSKAQREM

SEQ ID NO: 2569 - protein, 16 aa, synthetic construct
TVHGSGSPHSKAQSQQ

SEQ ID NO: 2570 - protein, 16 aa, synthetic construct
TINGGGSPHSKSQNRQ

SEQ ID NO: 2571 - protein, 16 aa, synthetic construct
TINGSGSPHSKAQYRA

SEQ ID NO: 2572 - protein, 16 aa, synthetic construct
TINGGGSPHSKAQRQQ

SEQ ID NO: 2573 - protein, 16 aa, synthetic construct
TEPMSGSPHSKAQNQQ

SEQ ID NO: 2574 - protein, 16 aa, synthetic construct
TINGSGSPHSKNQWQQ

SEQ ID NO: 2575 - protein, 16 aa, synthetic construct
ETAGSGSPHSKAQNQQ

SEQ ID NO: 2576 - protein, 16 aa, synthetic construct
TINGSGSPHSKAQRMN

SEQ ID NO: 2577 - protein, 16 aa, synthetic construct
NNLGSGSPHSKAQNQQ

SEQ ID NO: 2578 - protein, 16 aa, synthetic construct
TINGSGSPHAKAQNHQ

SEQ ID NO: 2579 - protein, 16 aa, synthetic construct
TIIKNGSPHSKAQNQQ

SEQ ID NO: 2580 - protein, 16 aa, synthetic construct
TINGSGSPHSKAGDSQ

SEQ ID NO: 2581 - protein, 16 aa, synthetic construct
TINGSGSPHSKLKSQQ

SEQ ID NO: 2582 - protein, 16 aa, synthetic construct
TINGSGSPHSKAQKIS

SEQ ID NO: 2583 - protein, 16 aa, synthetic construct
TEYNSGSPHSKAQNQQ

SEQ ID NO: 2584 - protein, 16 aa, synthetic construct
TINGSGSPHSKAPSMQ

SEQ ID NO: 2585 - protein, 16 aa, synthetic construct
AINGSGSPHSKAQNQQ

SEQ ID NO: 2586 - protein, 16 aa, synthetic construct
TINGSGSPHSKASPRQ

SEQ ID NO: 2587 - protein, 16 aa, synthetic construct
TINGSGSPHSKRMEQQ

SEQ ID NO: 2588 - protein, 16 aa, synthetic construct
TINGSGSPHSKAQYQN

SEQ ID NO: 2589 - protein, 16 aa, synthetic construct
TINGSGSPHSKAQYYV

SEQ ID NO: 2590 - protein, 16 aa, synthetic construct
TINGSGSPHSKLRRQQ

SEQ ID NO: 2591 - protein, 16 aa, synthetic construct
TINGSGSPHSKAGCGQ

SEQ ID NO: 2592 - protein, 16 aa, synthetic construct
SMNGSGSPHSRAQNQQ

SEQ ID NO: 2593 - protein, 16 aa, synthetic construct
TINGSGSPHSKRLRQQ

SEQ ID NO: 2594 - protein, 16 aa, synthetic construct
TINGSGSPHSLRRNQQ

SEQ ID NO: 2595 - protein, 16 aa, synthetic construct
TINGSGSPHSRGRNQQ

SEQ ID NO: 2596 - protein, 16 aa, synthetic construct
TINGSGSPHSSRRNQQ

SEQ ID NO: 2597 - protein, 16 aa, synthetic construct
TINGSGSPHSKAFRLQ

SEQ ID NO: 2598 - protein, 16 aa, synthetic construct
TINGSCSPHRKAQNQQ

SEQ ID NO: 2599 - protein, 16 aa, synthetic construct
TINGSGSPHFLRQNQQ

SEQ ID NO: 2600 - protein, 16 aa, synthetic construct
TINGSGSPHSLRFNQQ

SEQ ID NO: 2601 - protein, 16 aa, synthetic construct
TINGSGSPHSKWLLQQ

SEQ ID NO: 2602 - protein, 16 aa, synthetic construct
TINGSGSPHSKRRLQQ

SEQ ID NO: 2603 - protein, 16 aa, synthetic construct
TINGSGSPHSKAQRKL

SEQ ID NO: 2604 - protein, 16 aa, synthetic construct
TINGSGSPHSKALRRQ

SEQ ID NO: 2605 - protein, 16 aa, synthetic construct
TINGSGSPHSKAQRLR

SEQ ID NO: 2606 - protein, 16 aa, synthetic construct
YLSGSGSPHSKAQNQQ

SEQ ID NO: 2607 - protein, 16 aa, synthetic construct
TINGSGSPHSKAQRRL

SEQ ID NO: 2608 - protein, 16 aa, synthetic construct
TINGSGSPHSKARRQQ

SEQ ID NO: 2609 - protein, 16 aa, synthetic construct
TINGSGSPHSKARRLQ

SEQ ID NO: 2610 - protein, 16 aa, synthetic construct
TINGSGSPHSKSRRQQ

SEQ ID NO: 2611 - protein, 16 aa, synthetic construct
TINGLLSPHWKAQNQQ

SEQ ID NO: 2612 - protein, 16 aa, synthetic construct
TINGSGSPHSKARLRQ

SEQ ID NO: 2613 - protein, 16 aa, synthetic construct
TINGSGSPHSKASKRQ

SEQ ID NO: 2614 - protein, 16 aa, synthetic construct
TINGSGSPHVRRQNQQ

SEQ ID NO: 2615 - protein, 16 aa, synthetic construct
TINGSGSPHSKAQLYR

SEQ ID NO: 2616 - protein, 16 aa, synthetic construct
GLSGSGSPHSKAQNQQ

SEQ ID NO: 2617 - protein, 16 aa, synthetic construct
TINGSGSPHSKAQLTV

SEQ ID NO: 2618 - protein, 16 aa, synthetic construct
TINGHDSPHKRGQHRQ

SEQ ID NO: 2619 - protein, 16 aa, synthetic construct
MPEGHDSPHKSGQNQQ

SEQ ID NO: 2620 - protein, 16 aa, synthetic construct
MEGGHDSPHKSGQNQQ

SEQ ID NO: 2621 - protein, 16 aa, synthetic construct
MEYGHDSPHKSGQNQQ

SEQ ID NO: 2622 - protein, 16 aa, synthetic construct
AEWGHDSPHKSGQNQQ

SEQ ID NO: 2623 - protein, 16 aa, synthetic construct
CEWGHDSPHKSGQNQQ

SEQ ID NO: 2624 - protein, 16 aa, synthetic construct
ANNGQDSPHKSGQNQQ

SEQ ID NO: 2625 - protein, 16 aa, synthetic construct
IPEGHDSPHKSGQNQQ

SEQ ID NO: 2626 - protein, 16 aa, synthetic construct
ADMGHDSPHKSGQNQQ

SEQ ID NO: 2627 - protein, 16 aa, synthetic construct
IEYGHDSPHKSGQNQQ

SEQ ID NO: 2628 - protein, 16 aa, synthetic construct
ADYGHDSPHKSGQNQQ

SEQ ID NO: 2629 - protein, 16 aa, synthetic construct
IETGHDSPHKSGQNQQ

SEQ ID NO: 2630 - protein, 16 aa, synthetic construct
MEWGHDSPHKSGQNQQ

SEQ ID NO: 2631 - protein, 16 aa, synthetic construct
CEYGHDSPHKSGQNQQ

SEQ ID NO: 2632 - protein, 16 aa, synthetic construct
RINGHDSPHKSGQKQQ

SEQ ID NO: 2633 - protein, 16 aa, synthetic construct
MEIGHDSPHKSGQNQQ

SEQ ID NO: 2634 - protein, 16 aa, synthetic construct
LEYGHDSPHKSGQNQQ

SEQ ID NO: 2635 - protein, 16 aa, synthetic construct
ADWGHDSPHKSGQNQQ

SEQ ID NO: 2636 - protein, 16 aa, synthetic construct
IEIGHDSPHKSGQNQQ

SEQ ID NO: 2637 - protein, 16 aa, synthetic construct
DIMGHDSPHKSGQNQQ

SEQ ID NO: 2638 - protein, 16 aa, synthetic construct
FEQGHDSPHKSGQNQQ

SEQ ID NO: 2639 - protein, 16 aa, synthetic construct
MEFGHDSPHKSGQNQQ

SEQ ID NO: 2640 - protein, 16 aa, synthetic construct
CDQGHDSPHKSGQNQQ

SEQ ID NO: 2641 - protein, 16 aa, synthetic construct
LPEGHDSPHKSGQNQQ

SEQ ID NO: 2642 - protein, 16 aa, synthetic construct
IENGHDSPHKSGQNQQ

SEQ ID NO: 2643 - protein, 16 aa, synthetic construct
MESGHDSPHKSGQNQQ

SEQ ID NO: 2644 - protein, 16 aa, synthetic construct
AEIGHDSPHKSGQNQQ

SEQ ID NO: 2645 - protein, 16 aa, synthetic construct
VEYGHDSPHKSGQNQQ

SEQ ID NO: 2646 - protein, 16 aa, synthetic construct
IINGHDSPHKSGLTQQ

SEQ ID NO: 2647 - protein, 16 aa, synthetic construct
TSNGDDSPHKSGRNQQ

SEQ ID NO: 2648 - protein, 16 aa, synthetic construct
IEVGHDSPHKSGQNQQ

SEQ ID NO: 2649 - protein, 16 aa, synthetic construct
MEMGHDSPHKSGQNQQ

SEQ ID NO: 2650 - protein, 16 aa, synthetic construct
AEVGHDSPHKSGQNQQ

SEQ ID NO: 2651 - protein, 16 aa, synthetic construct
MDAGHDSPHKSGQNQQ

SEQ ID NO: 2652 - protein, 16 aa, synthetic construct
VEWGHDSPHKSGQNQQ

SEQ ID NO: 2653 - protein, 16 aa, synthetic construct
AEQGHDSPHKSGQNQQ

SEQ ID NO: 2654 - protein, 16 aa, synthetic construct
LEWGHDSPHKSGQNQQ

SEQ ID NO: 2655 - protein, 16 aa, synthetic construct
MELGHDSPHKSGQNQQ

SEQ ID NO: 2656 - protein, 16 aa, synthetic construct
METGHDSPHKSGQNQQ

SEQ ID NO: 2657 - protein, 16 aa, synthetic construct
MEAGHDSPHKSGQNQQ

SEQ ID NO: 2658 - protein, 16 aa, synthetic construct
IESGHDSPHKSGQNQQ

SEQ ID NO: 2659 - protein, 16 aa, synthetic construct
MEVGHDSPHKSGQNQQ

SEQ ID NO: 2660 - protein, 16 aa, synthetic construct
CEIGHDSPHKSGQNQQ

SEQ ID NO: 2661 - protein, 16 aa, synthetic construct
ATNGHDSPHKSGLNQQ

SEQ ID NO: 2662 - protein, 16 aa, synthetic construct
MDGGHDSPHKSGQNQQ

SEQ ID NO: 2663 - protein, 16 aa, synthetic construct
QEVGHDSPHKSGQNQQ

SEQ ID NO: 2664 - protein, 16 aa, synthetic construct
ADQGHDSPHKSGQNQQ

SEQ ID NO: 2665 - protein, 16 aa, synthetic construct
TINGHESPHKSAQNHQ

SEQ ID NO: 2666 - protein, 16 aa, synthetic construct
TINGHDSPHKSAQNQW

SEQ ID NO: 2667 - protein, 16 aa, synthetic construct
NMNGHDSPHKSGQNTH

SEQ ID NO: 2668 - protein, 16 aa, synthetic construct
IEMGHDSPHKSGQNQQ

SEQ ID NO: 2669 - protein, 16 aa, synthetic construct
TINGHDSPHKSGRRRQ

SEQ ID NO: 2670 - protein, 16 aa, synthetic construct
ISNGHDSPHKSAQNQQ

SEQ ID NO: 2671 - protein, 16 aa, synthetic construct
TGNGHDSPHKSGQYQQ

SEQ ID NO: 2672 - protein, 16 aa, synthetic construct
TINGNYSPHKIGQNQQ

SEQ ID NO: 2673 - protein, 16 aa, synthetic construct
TINGHDSPHKSRQNDQ

SEQ ID NO: 2674 - protein, 16 aa, synthetic construct
QQQGHDSPHKSGQNQQ

SEQ ID NO: 2675 - protein, 16 aa, synthetic construct
HDWGHDSPHKSGQNQQ

SEQ ID NO: 2676 - protein, 16 aa, synthetic construct
IEGGHDSPHKSGQNQQ

SEQ ID NO: 2677 - protein, 16 aa, synthetic construct
TFNRSGSPHSKAQNQQ

SEQ ID NO: 2678 - protein, 16 aa, synthetic construct
AINGHDSPHKSGQIRQ

SEQ ID NO: 2679 - protein, 16 aa, synthetic construct
TINGHDSPHKIGQNQH

SEQ ID NO: 2680 - protein, 16 aa, synthetic construct
AINGYDSPHKSGQKQQ

SEQ ID NO: 2681 - protein, 16 aa, synthetic construct
TESGHDSPHKSGQNQQ

SEQ ID NO: 2682 - protein, 16 aa, synthetic construct
TINGHDSPHKSGQSVQ

SEQ ID NO: 2683 - protein, 16 aa, synthetic construct
TINGHESPHKSGRSQQ

SEQ ID NO: 2684 - protein, 16 aa, synthetic construct
TINGHDSPHKSGQNKL

SEQ ID NO: 2685 - protein, 16 aa, synthetic construct
TINGHDSPHKTGQNQQ

SEQ ID NO: 2686 - protein, 16 aa, synthetic construct
TINGRGSPHKRGQNQQ

SEQ ID NO: 2687 - protein, 16 aa, synthetic construct
TINGSGSPHTKAQNPP

SEQ ID NO: 2688 - protein, 16 aa, synthetic construct
TINGQDSPHKSGQHQQ

SEQ ID NO: 2689 - protein, 16 aa, synthetic construct
SINGHDSPHKSGQIQH

SEQ ID NO: 2690 - protein, 16 aa, synthetic construct
AINGHDSPHKSGPRQQ

SEQ ID NO: 2691 - protein, 16 aa, synthetic construct
TVNGHDSPHKSGHTQQ

SEQ ID NO: 2692 - protein, 16 aa, synthetic construct
SINGHDSPHKSGQRQH

SEQ ID NO: 2693 - protein, 16 aa, synthetic construct
SLNGSGSPHTKAQNQQ

SEQ ID NO: 2694 - protein, 16 aa, synthetic construct
AINGHDSPHKSAQSQQ

SEQ ID NO: 2695 - protein, 16 aa, synthetic construct
SIYGHESPHKSGQNQQ

SEQ ID NO: 2696 - protein, 16 aa, synthetic construct
TVNGHDSPHKSLQNQQ

SEQ ID NO: 2697 - protein, 16 aa, synthetic construct
TINGHGSPHSKAQNPQ

SEQ ID NO: 2698 - protein, 16 aa, synthetic construct
TSNGYDSPHKSGQKQQ

SEQ ID NO: 2699 - protein, 16 aa, synthetic construct
TVNGHDSPHKSGRNQE

SEQ ID NO: 2700 - protein, 16 aa, synthetic construct
TTNGHDSPHKSGQTQL

SEQ ID NO: 2701 - protein, 16 aa, synthetic construct
AINGHDSPHKSEKNQQ

SEQ ID NO: 2702 - protein, 16 aa, synthetic construct
IINGRDSPHKSGQDQQ

SEQ ID NO: 2703 - protein, 16 aa, synthetic construct
TISGHDSPHKTGHNQQ

SEQ ID NO: 2704 - protein, 16 aa, synthetic construct
SINGYDSPHKSGQTQQ

SEQ ID NO: 2705 - protein, 16 aa, synthetic construct
TINGHESPHKSGQTQQ

SEQ ID NO: 2706 - protein, 16 aa, synthetic construct
TINGHDSPHKSGQSKQ

SEQ ID NO: 2707 - protein, 16 aa, synthetic construct
AIIGHESPHKSGQNQQ

SEQ ID NO: 2708 - protein, 16 aa, synthetic construct
TINGHDSPHKTGQNQP

SEQ ID NO: 2709 - protein, 16 aa, synthetic construct
AINGHDSPHKSGQSPQ

SEQ ID NO: 2710 - protein, 16 aa, synthetic construct
TIKGNDSPHKSVQNQQ

SEQ ID NO: 2711 - protein, 16 aa, synthetic construct
TEFGHDSPHKSGQNQQ

SEQ ID NO: 2712 - protein, 16 aa, synthetic construct
TINGHDSPHKSAQNYQ

SEQ ID NO: 2713 - protein, 16 aa, synthetic construct
TFNGSASPHSKALNQQ

SEQ ID NO: 2714 - protein, 16 aa, synthetic construct
TINGHESPHKSAQNRQ

SEQ ID NO: 2715 - protein, 16 aa, synthetic construct
TTNGHDSPHKSGQNQQ

SEQ ID NO: 2716 - protein, 16 aa, synthetic construct
TIKGQDSPHKIGQNQQ

SEQ ID NO: 2717 - protein, 16 aa, synthetic construct
TVNGHDSPHKSGQNHL

SEQ ID NO: 2718 - protein, 16 aa, synthetic construct
SINGHDSPHKSGQYQH

SEQ ID NO: 2719 - protein, 16 aa, synthetic construct
TINGNDSPHKSVQNHQ

SEQ ID NO: 2720 - protein, 16 aa, synthetic construct
TITGHDSPHKSGQNQW

SEQ ID NO: 2721 - protein, 16 aa, synthetic construct
TNNGHDSPHKSVQNQH

SEQ ID NO: 2722 - protein, 16 aa, synthetic construct
TIDGHDSPHKSGQNQH

SEQ ID NO: 2723 - protein, 16 aa, synthetic construct
TVNGHDSPHKSGQTRQ

SEQ ID NO: 2724 - protein, 16 aa, synthetic construct
TVNGHDSPHKSGQNLH

SEQ ID NO: 2725 - protein, 16 aa, synthetic construct
AISGHDSPHKSGLNQQ

SEQ ID NO: 2726 - protein, 16 aa, synthetic construct
AINGHDSPHKSAQNQE

SEQ ID NO: 2727 - protein, 16 aa, synthetic construct
TITGHDSPHKSGQHLQ

SEQ ID NO: 2728 - protein, 16 aa, synthetic construct
TINGHDSPHKSRLNQP

SEQ ID NO: 2729 - protein, 16 aa, synthetic construct
TVDGHDSPHKSGQKQQ

SEQ ID NO: 2730 - protein, 16 aa, synthetic construct
TINGQDSPHKSGQNQD

SEQ ID NO: 2731 - protein, 16 aa, synthetic construct
TIEGHDSPHKSGRNQQ

SEQ ID NO: 2732 - protein, 16 aa, synthetic construct
TTNGHDSPHKSGQNLL

SEQ ID NO: 2733 - protein, 16 aa, synthetic construct
TINGHDSPHKSGQLVI

SEQ ID NO: 2734 - protein, 16 aa, synthetic construct
TVNGHDSPHKSRQSQQ

SEQ ID NO: 2735 - protein, 16 aa, synthetic construct
TINGHDSPHKSGRTQE

SEQ ID NO: 2736 - protein, 16 aa, synthetic construct
TINGHDSPHKSVQTHQ

SEQ ID NO: 2737 - protein, 16 aa, synthetic construct
TSNGHDSPHKSGQNQP

SEQ ID NO: 2738 - protein, 16 aa, synthetic construct
VINGHDSPHKSGQTQQ

SEQ ID NO: 2739 - protein, 16 aa, synthetic construct
TINGPDSPHKIGQNQQ

SEQ ID NO: 2740 - protein, 16 aa, synthetic construct
AVNGHDSPHKSVQNQQ

SEQ ID NO: 2741 - protein, 16 aa, synthetic construct
TINGHDSPHKSRQDQH

SEQ ID NO: 2742 - protein, 16 aa, synthetic construct
AINGPDSPHKSGQKQQ

SEQ ID NO: 2743 - protein, 16 aa, synthetic construct
TINGHDSPHKSRQSQH

SEQ ID NO: 2744 - protein, 16 aa, synthetic construct
TIYGHDSPHKSVQNQL

SEQ ID NO: 2745 - protein, 16 aa, synthetic construct
TVNGHDSPHKSGQNLL

SEQ ID NO: 2746 - protein, 16 aa, synthetic construct
TENKSGSPHSKAQNQQ

SEQ ID NO: 2747 - protein, 16 aa, synthetic construct
TTNGQDSPHKSGQNQQ

SEQ ID NO: 2748 - protein, 16 aa, synthetic construct
TDKGSGSPHSKAQNQQ

SEQ ID NO: 2749 - protein, 16 aa, synthetic construct
TIDGHDSPHKSGRNQQ

SEQ ID NO: 2750 - protein, 16 aa, synthetic construct
TINGYDSPHKSGQYQH

SEQ ID NO: 2751 - protein, 16 aa, synthetic construct
TDNGHDSPHKSRQNQQ

SEQ ID NO: 2752 - protein, 16 aa, synthetic construct
TINGHDSPHKSWVRQQ

SEQ ID NO: 2753 - protein, 16 aa, synthetic construct
TINGHESPHKSGQNQH

SEQ ID NO: 2754 - protein, 16 aa, synthetic construct
TVNGHDSPHKIGHNQQ

SEQ ID NO: 2755 - protein, 16 aa, synthetic construct
TCNGHDSPHKSGRNQQ

SEQ ID NO: 2756 - protein, 16 aa, synthetic construct
TINGNGSPHSKAQNHQ

SEQ ID NO: 2757 - protein, 16 aa, synthetic construct
NVVGHDSPHKSGQNQQ

SEQ ID NO: 2758 - protein, 16 aa, synthetic construct
TINGHDSPHKSNAWQQ

SEQ ID NO: 2759 - protein, 16 aa, synthetic construct
TDAGHDSPHKSGQNQQ

SEQ ID NO: 2760 - protein, 16 aa, synthetic construct
TEVGHDSPHKSGQNQQ

SEQ ID NO: 2761 - protein, 16 aa, synthetic construct
SELGHDSPHKSGQNQQ

SEQ ID NO: 2762 - protein, 16 aa, synthetic construct
TINGHDSPHKSGQSVP

SEQ ID NO: 2763 - protein, 16 aa, synthetic construct
TINGHESPHKSGQNIQ

SEQ ID NO: 2764 - protein, 16 aa, synthetic construct
TINGHDSPHKSVQNHL

SEQ ID NO: 2765 - protein, 16 aa, synthetic construct
TINGHDSPHKIGLDQQ

SEQ ID NO: 2766 - protein, 16 aa, synthetic construct
TSNASGSPHSKAQHQQ

SEQ ID NO: 2767 - protein, 16 aa, synthetic construct
TINGHDSPHKRGPDQQ

SEQ ID NO: 2768 - protein, 16 aa, synthetic construct
TINGMGSPHSKTQNQQ

SEQ ID NO: 2769 - protein, 16 aa, synthetic construct
TIKGHDSPHKSGESQQ

SEQ ID NO: 2770 - protein, 16 aa, synthetic construct
TINGHDSPHKHGQNHQ

SEQ ID NO: 2771 - protein, 16 aa, synthetic construct
TVNGTGSPHSKAQNQL

SEQ ID NO: 2772 - protein, 16 aa, synthetic construct
TIIGHDSPHKSGQYQH

SEQ ID NO: 2773 - protein, 16 aa, synthetic construct
TSNGHDSPHKSVQNKQ

SEQ ID NO: 2774 - protein, 16 aa, synthetic construct
IVNGQVSPHKSGQNQQ

SEQ ID NO: 2775 - protein, 16 aa, synthetic construct
TVNGHDSPHKSGQRQL

SEQ ID NO: 2776 - protein, 16 aa, synthetic construct
TVNGHDSPHKIGQNQL

SEQ ID NO: 2777 - protein, 16 aa, synthetic construct
TINGHDSPHKSGQIIV

SEQ ID NO: 2778 - protein, 16 aa, synthetic construct
IGNGHESPHKSGQNQQ

SEQ ID NO: 2779 - protein, 16 aa, synthetic construct
EVMGHDSPHKSGQNQQ

SEQ ID NO: 2780 - protein, 16 aa, synthetic construct
TINGYDSPHKSGQKQS

SEQ ID NO: 2781 - protein, 16 aa, synthetic construct
TIHGNGSPHSKAQNQE

SEQ ID NO: 2782 - protein, 16 aa, synthetic construct
YQVGHDSPHKSGQNQQ

SEQ ID NO: 2783 - protein, 16 aa, synthetic construct
TIKGDDSPHKSVQNQQ

SEQ ID NO: 2784 - protein, 16 aa, synthetic construct
TINGHDSPHKSVQSHQ

SEQ ID NO: 2785 - protein, 16 aa, synthetic construct
TINGHDSPHKSGQFVV

SEQ ID NO: 2786 - protein, 16 aa, synthetic construct
TVNGHDSPHKSRQNLQ

SEQ ID NO: 2787 - protein, 16 aa, synthetic construct
ATNGHNSPHKSGQNQE

SEQ ID NO: 2788 - protein, 16 aa, synthetic construct
AINGHDSPHKSAQNQQ

SEQ ID NO: 2789 - protein, 16 aa, synthetic construct
TEHGHDSPHKSGQNQQ

SEQ ID NO: 2790 - protein, 16 aa, synthetic construct
TIYGHDSPHKSGQSQP

SEQ ID NO: 2791 - protein, 16 aa, synthetic construct
TISGHESPHKSGQNEQ

SEQ ID NO: 2792 - protein, 16 aa, synthetic construct
AIIGHDSPHKSAQNQQ

SEQ ID NO: 2793 - protein, 16 aa, synthetic construct
AIDGHDSPHKSGQNQL

SEQ ID NO: 2794 - protein, 16 aa, synthetic construct
TIMGHDSPHKSVQNQQ

SEQ ID NO: 2795 - protein, 16 aa, synthetic construct
EVGGHDSPHKSGQNQQ

SEQ ID NO: 2796 - protein, 16 aa, synthetic construct
TINGHDSPHKSAQNLL

SEQ ID NO: 2797 - protein, 16 aa, synthetic construct
TINASGSPHSKAINQQ

SEQ ID NO: 2798 - protein, 16 aa, synthetic construct
AINGNGSPHKRGQNQQ

SEQ ID NO: 2799 - protein, 16 aa, synthetic construct
SEMGHDSPHKSGQNQQ

SEQ ID NO: 2800 - protein, 16 aa, synthetic construct
AQQGHDSPHKSGQNQQ

SEQ ID NO: 2801 - protein, 16 aa, synthetic construct
AINGHDSPHKSGQSLQ

SEQ ID NO: 2802 - protein, 16 aa, synthetic construct
TINGSGSPHSKAPNQQ

SEQ ID NO: 2803 - protein, 16 aa, synthetic construct
CGEGHDSPHKSGQNQQ

SEQ ID NO: 2804 - protein, 16 aa, synthetic construct
TVNGHDSPHKSAQNHQ

SEQ ID NO: 2805 - protein, 16 aa, synthetic construct
TVNGHDSPHKSGQTQL

SEQ ID NO: 2806 - protein, 16 aa, synthetic construct
TNNGHDSPHKSGRNRQ

SEQ ID NO: 2807 - protein, 16 aa, synthetic construct
TINGHDSPHKYGQNEQ

SEQ ID NO: 2808 - protein, 16 aa, synthetic construct
TINGNGSPHSKAPNLQ

SEQ ID NO: 2809 - protein, 16 aa, synthetic construct
SINGHDSPHKSQQNQQ

SEQ ID NO: 2810 - protein, 16 aa, synthetic construct
TIGGHDSPHKSGQNQQ

SEQ ID NO: 2811 - protein, 16 aa, synthetic construct
TINGHDSPHKSVQSKQ

SEQ ID NO: 2812 - protein, 16 aa, synthetic construct
ELVGHDSPHKSGQNQQ

SEQ ID NO: 2813 - protein, 16 aa, synthetic construct
ELMGHDSPHKSGQNQQ

SEQ ID NO: 2814 - protein, 16 aa, synthetic construct
TINGNDSPHKIGHNQQ

SEQ ID NO: 2815 - protein, 16 aa, synthetic construct
TIKGGGSPHSKAQDQQ

SEQ ID NO: 2816 - protein, 16 aa, synthetic construct
TVNGHDSPHKSGQTQQ

SEQ ID NO: 2817 - protein, 16 aa, synthetic construct
TINGQDSPHKSGQNPL

SEQ ID NO: 2818 - protein, 16 aa, synthetic construct
TVNASGSPHSKAQNHQ

SEQ ID NO: 2819 - protein, 16 aa, synthetic construct
TINGHDSPHKSGRDQK

SEQ ID NO: 2820 - protein, 16 aa, synthetic construct
TINGHDSPHKSVHNQQ

SEQ ID NO: 2821 - protein, 16 aa, synthetic construct
TINGHDSPHKSGQWKR

SEQ ID NO: 2822 - protein, 16 aa, synthetic construct
TIDGSGSPHSKAENRQ

SEQ ID NO: 2823 - protein, 16 aa, synthetic construct
NEIGHDSPHKSGQNQQ

SEQ ID NO: 2824 - protein, 16 aa, synthetic construct
AINGHDSPHKSGQSQQ

SEQ ID NO: 2825 - protein, 16 aa, synthetic construct
IINGHDSPHKSRQAQQ

SEQ ID NO: 2826 - protein, 16 aa, synthetic construct
TPNGHDSPHKSGQNQQ

SEQ ID NO: 2827 - protein, 16 aa, synthetic construct
ITNGHDSPHKSGQTQQ

SEQ ID NO: 2828 - protein, 16 aa, synthetic construct
TINGHDSPHKSVQNHQ

SEQ ID NO: 2829 - protein, 16 aa, synthetic construct
TINGHDSPHKSKQNQQ

SEQ ID NO: 2830 - protein, 16 aa, synthetic construct
TINGHDSPHKSAQNQL

SEQ ID NO: 2831 - protein, 16 aa, synthetic construct
TVNGHDSPHKSGQTQP

SEQ ID NO: 2832 - protein, 16 aa, synthetic construct
TDQGHDSPHKSGQNQQ

SEQ ID NO: 2833 - protein, 16 aa, synthetic construct
TINGHDSPHKLWINQQ

SEQ ID NO: 2834 - protein, 16 aa, synthetic construct
GINGPDSPHKSGQNQQ

SEQ ID NO: 2835 - protein, 16 aa, synthetic construct
SEIGHDSPHKSGQNQQ

SEQ ID NO: 2836 - protein, 16 aa, synthetic construct
TINGHDSPHKSVQKQL

SEQ ID NO: 2837 - protein, 16 aa, synthetic construct
TINGHPSPHWKGQNQQ

SEQ ID NO: 2838 - protein, 16 aa, synthetic construct
TVNGHDSPHKSGRNQL

SEQ ID NO: 2839 - protein, 16 aa, synthetic construct
TIKGSGSPHSKVQDQQ

SEQ ID NO: 2840 - protein, 16 aa, synthetic construct
SEKGHDSPHKSGQNQQ

SEQ ID NO: 2841 - protein, 16 aa, synthetic construct
WSAGHDSPHKSGQNQQ

SEQ ID NO: 2842 - protein, 16 aa, synthetic construct
ELAGHDSPHKSGQNQQ

SEQ ID NO: 2843 - protein, 16 aa, synthetic construct
TINGHDSPHKMGRNQQ

SEQ ID NO: 2844 - protein, 16 aa, synthetic construct
TINGHDSPHKSGISIQ

SEQ ID NO: 2845 - protein, 16 aa, synthetic construct
TSNGHDSPHKSVQNLQ

SEQ ID NO: 2846 - protein, 16 aa, synthetic construct
QTQGHDSPHKSGQNQQ

SEQ ID NO: 2847 - protein, 16 aa, synthetic construct
TINGHDSPHKMAHNQQ

SEQ ID NO: 2848 - protein, 16 aa, synthetic construct
AINGSGSPHSKAQTQQ

SEQ ID NO: 2849 - protein, 16 aa, synthetic construct
TINGHDSPHKHGQNQQ

SEQ ID NO: 2850 - protein, 16 aa, synthetic construct
GADGHDSPHKSGQNQQ

SEQ ID NO: 2851 - protein, 16 aa, synthetic construct
VGEGHDSPHKSGQNQQ

SEQ ID NO: 2852 - protein, 16 aa, synthetic construct
ANEGHDSPHKSGQNQQ

SEQ ID NO: 2853 - protein, 16 aa, synthetic construct
TEAKSGSPHSKAQNQQ

SEQ ID NO: 2854 - protein, 16 aa, synthetic construct
TINGHDSPHKSVQSQQ

SEQ ID NO: 2855 - protein, 16 aa, synthetic construct
TIPGSGSPHSKAQNLQ

SEQ ID NO: 2856 - protein, 16 aa, synthetic construct
TINGHDSPHKSGQTVC

SEQ ID NO: 2857 - protein, 16 aa, synthetic construct
ELRGHDSPHKSGQNQQ

SEQ ID NO: 2858 - protein, 16 aa, synthetic construct
CQIGHDSPHKSGQNQQ

SEQ ID NO: 2859 - protein, 16 aa, synthetic construct
GVMGHDSPHKSGQNQQ

SEQ ID NO: 2860 - protein, 16 aa, synthetic construct
ACDGHDSPHKSGQNQQ

SEQ ID NO: 2861 - protein, 16 aa, synthetic construct
TINGQDSPHKSGQYQQ

SEQ ID NO: 2862 - protein, 16 aa, synthetic construct
TINGHDSPHKSGQQIM

SEQ ID NO: 2863 - protein, 16 aa, synthetic construct
TINGHDSPHKSRQNEQ

SEQ ID NO: 2864 - protein, 16 aa, synthetic construct
ASNGHDSPHKSGLNHQ

SEQ ID NO: 2865 - protein, 16 aa, synthetic construct
TVNGHDSPHKSGQSQP

SEQ ID NO: 2866 - protein, 16 aa, synthetic construct
NELGHDSPHKSGQNQQ

SEQ ID NO: 2867 - protein, 16 aa, synthetic construct
AAEGHDSPHKSGQNQQ

SEQ ID NO: 2868 - protein, 16 aa, synthetic construct
GQNGHDSPHKSGQNQQ

SEQ ID NO: 2869 - protein, 16 aa, synthetic construct
NEFGHDSPHKSGQNQQ

SEQ ID NO: 2870 - protein, 16 aa, synthetic construct
TSIGYDSPHKSGQNQQ

SEQ ID NO: 2871 - protein, 16 aa, synthetic construct
TDNGHDSPHKSGQNLQ

SEQ ID NO: 2872 - protein, 16 aa, synthetic construct
TITGHDSPHKSRQDQQ

SEQ ID NO: 2873 - protein, 16 aa, synthetic construct
AEHGHDSPHKSGQNQQ

SEQ ID NO: 2874 - protein, 16 aa, synthetic construct
TINGDDSPHKSGQKQL

SEQ ID NO: 2875 - protein, 16 aa, synthetic construct
EILGHDSPHKSGQNQQ

SEQ ID NO: 2876 - protein, 16 aa, synthetic construct
TIHGSGSPHSKAQNQA

SEQ ID NO: 2877 - protein, 16 aa, synthetic construct
AINGDDSPHKSGHNQQ

SEQ ID NO: 2878 - protein, 16 aa, synthetic construct
TSNGHNSPHKSGQNQE

SEQ ID NO: 2879 - protein, 16 aa, synthetic construct
TINGHDSPHKSGQMIH

SEQ ID NO: 2880 - protein, 16 aa, synthetic construct
NAIGHDSPHKSGQNQQ

SEQ ID NO: 2881 - protein, 16 aa, synthetic construct
VINGHDSPHKSGRNHQ

SEQ ID NO: 2882 - protein, 16 aa, synthetic construct
TITGHDSPHKSVQNRQ

SEQ ID NO: 2883 - protein, 16 aa, synthetic construct
TINGHDSPHKSGQKMN

SEQ ID NO: 2884 - protein, 16 aa, synthetic construct
TIHGHDSPHKSGQSQQ

SEQ ID NO: 2885 - protein, 16 aa, synthetic construct
TEIGHDSPHKSGQNQQ

SEQ ID NO: 2886 - protein, 16 aa, synthetic construct
TINGHDSPHKSGQYQH

SEQ ID NO: 2887 - protein, 14 aa, synthetic construct
GSGSPHSKAQNRHT

SEQ ID NO: 2888 - protein, 14 aa, synthetic construct
GSGSPHSKVQNQQT

SEQ ID NO: 2889 - protein, 14 aa, synthetic construct
MSGSPHSKAQNQQT

SEQ ID NO: 2890 - protein, 14 aa, synthetic construct
GSGSPHSKARDQQT

SEQ ID NO: 2891 - protein, 14 aa, synthetic construct
GSGSPHSKAPNLQT

SEQ ID NO: 2892 - protein, 14 aa, synthetic construct
TSGSPHSKAQNQQT

SEQ ID NO: 2893 - protein, 14 aa, synthetic construct
GSGSPHSKAHVRQT

SEQ ID NO: 2894 - protein, 14 aa, synthetic construct
GSGSPHSKAPNQHT

SEQ ID NO: 2895 - protein, 14 aa, synthetic construct
ISGSPHSKAQNQQT

SEQ ID NO: 2896 - protein, 14 aa, synthetic construct
GSGSPHSKTQSQQT

SEQ ID NO: 2897 - skipped

SEQ ID NO: 2898 - protein, 14 aa, synthetic construct
ESGSPHSKAQNQQI

SEQ ID NO: 2899 - protein, 14 aa, synthetic construct
GSGSPHSKAQPAKT

SEQ ID NO: 2900 - protein, 14 aa, synthetic construct
SSGSPHSKAQNQQT

SEQ ID NO: 2901 - protein, 14 aa, synthetic construct
GSGSPHSKSQTQQN

SEQ ID NO: 2902 - protein, 14 aa, synthetic construct
ASGSPHSKAQNQQT

SEQ ID NO: 2903 - protein, 14 aa, synthetic construct
GSGSPHSKAQNLAT

SEQ ID NO: 2904 - protein, 14 aa, synthetic construct
GSGSPHSKSQNQLT

SEQ ID NO: 2905 - protein, 14 aa, synthetic construct
NSGSPHSKAQNQQT

SEQ ID NO: 2906 - protein, 14 aa, synthetic construct
GSGSPHSKAQGQQT

SEQ ID NO: 2907 - protein, 14 aa, synthetic construct
VSGSPHSKAQNQQT

SEQ ID NO: 2908 - protein, 14 aa, synthetic construct
GSGSPHSKALNRQS

SEQ ID NO: 2909 - protein, 14 aa, synthetic construct
LSGSPHSKAQNQQT

SEQ ID NO: 2910 - protein, 14 aa, synthetic construct
GSGSPHSKAHNQQT

SEQ ID NO: 2911 - protein, 14 aa, synthetic construct
GSGSPHSKTQNQQT

SEQ ID NO: 2912 - protein, 14 aa, synthetic construct
GSGSPHSKAQNPPT

SEQ ID NO: 2913 - protein, 14 aa, synthetic construct
GSGSPHSKAQNLQT

SEQ ID NO: 2914 - protein, 14 aa, synthetic construct
GSGSPHSKAQYQQT

SEQ ID NO: 2915 - protein, 14 aa, synthetic construct
GSGSPHSKAQDQET

SEQ ID NO: 2916 - protein, 14 aa, synthetic construct
KSGSPHSKAQNQQT

SEQ ID NO: 2917 - protein, 14 aa, synthetic construct
GSGSPHSKAQNHQT

SEQ ID NO: 2918 - protein, 14 aa, synthetic construct
GSGSPHSKAQDQQT

SEQ ID NO: 2919 - protein, 14 aa, synthetic construct
GSGSPHSKGHWQQT

SEQ ID NO: 2920 - protein, 14 aa, synthetic construct
GSGSPHSKAPNQQT

SEQ ID NO: 2921 - protein, 14 aa, synthetic construct
GSGSPHSKAQNQLI

SEQ ID NO: 2922 - protein, 14 aa, synthetic construct
GSGSPHSKRPEQQT

SEQ ID NO: 2923 - protein, 14 aa, synthetic construct
GSGSPHSKAQRTMT

SEQ ID NO: 2924 - protein, 14 aa, synthetic construct
GSGSPHSKAQNQQH

SEQ ID NO: 2925 - protein, 14 aa, synthetic construct
HSGSPHSKAQNQQT

SEQ ID NO: 2926 - protein, 14 aa, synthetic construct
GSGSPHSKALHQHT

SEQ ID NO: 2927 - protein, 14 aa, synthetic construct
GSGSPHSKAQHRIT

SEQ ID NO: 2928 - protein, 14 aa, synthetic construct
GSGSPHSKAQYIHT

SEQ ID NO: 2929 - protein, 14 aa, synthetic construct
GSGSPHSKAQKFET

SEQ ID NO: 2930 - protein, 14 aa, synthetic construct
ESGSPHSKAQNHQT

SEQ ID NO: 2931 - protein, 14 aa, synthetic construct
GSGSPHSKAQFPST

SEQ ID NO: 2932 - protein, 14 aa, synthetic construct
PSGSPHSKAQNQQT

SEQ ID NO: 2933 - protein, 14 aa, synthetic construct
GSGSPHSKAHNQQR

SEQ ID NO: 2934 - protein, 14 aa, synthetic construct
GSGSPHSKAQAIKT

SEQ ID NO: 2935 - protein, 14 aa, synthetic construct
GSGSPHSKGQNRQT

SEQ ID NO: 2936 - protein, 14 aa, synthetic construct
GSGSPHSKAQSQQT

SEQ ID NO: 2937 - protein, 14 aa, synthetic construct
ASGSPHSKAQNQLT

SEQ ID NO: 2938 - protein, 14 aa, synthetic construct
RSGSPHSKAQNQQT

SEQ ID NO: 2939 - protein, 14 aa, synthetic construct
GSGSPHSKAQYQHT

SEQ ID NO: 2940 - protein, 14 aa, synthetic construct
GSGSPHTKAQNPQS

SEQ ID NO: 2941 - protein, 14 aa, synthetic construct
GSGSPHSKGQNPPT

SEQ ID NO: 2942 - protein, 14 aa, synthetic construct
GSGSPHSKAQHQLT

SEQ ID NO: 2943 - protein, 14 aa, synthetic construct
GSGSPHSKAQSPPT

SEQ ID NO: 2944 - protein, 14 aa, synthetic construct
GSGSPHSKAQAKLT

SEQ ID NO: 2945 - protein, 14 aa, synthetic construct
GSGSPHSKTKSQQT

SEQ ID NO: 2946 - protein, 14 aa, synthetic construct
GSGSPHSKAQDRPT

SEQ ID NO: 2947 - protein, 14 aa, synthetic construct
GSGSPHSKAQSQQL

SEQ ID NO: 2948 - protein, 14 aa, synthetic construct
GSGSPHSKAQAFHT

SEQ ID NO: 2949 - protein, 14 aa, synthetic construct
GSGSPHSKAQKQQD

SEQ ID NO: 2950 - protein, 14 aa, synthetic construct
GSGSPHSKAQNAQT

SEQ ID NO: 2951 - protein, 14 aa, synthetic construct
WSGSPHSKAQNQQT

SEQ ID NO: 2952 - protein, 14 aa, synthetic construct
GSGSPHSKAHNQLT

SEQ ID NO: 2953 - protein, 14 aa, synthetic construct
GSGSPHSKAQNQQY

SEQ ID NO: 2954 - protein, 14 aa, synthetic construct
GSGSPHSKAQKLNT

SEQ ID NO: 2955 - protein, 14 aa, synthetic construct
GSGSPHSKSQNVQT

SEQ ID NO: 2956 - protein, 14 aa, synthetic construct
GSGSPHSKAQAQQT

SEQ ID NO: 2957 - protein, 14 aa, synthetic construct
GSGSPHSKAQNLQA

SEQ ID NO: 2958 - protein, 14 aa, synthetic construct
DSGSPHSKAQNQQT

SEQ ID NO: 2959 - protein, 14 aa, synthetic construct
ASGSPHSKAPNQQT

SEQ ID NO: 2960 - protein, 14 aa, synthetic construct
GSGSPHSKAQTPPT

SEQ ID NO: 2961 - protein, 14 aa, synthetic construct
GSGSPHSKAQYQHA

SEQ ID NO: 2962 - protein, 14 aa, synthetic construct
GSGSPHSKAQGQQA

SEQ ID NO: 2963 - protein, 14 aa, synthetic construct
GSGSPHNKAQNHQT

SEQ ID NO: 2964 - protein, 14 aa, synthetic construct
GSGSPHSKAQPPAT

SEQ ID NO: 2965 - protein, 14 aa, synthetic construct
GSGSPHSKAQERPT

SEQ ID NO: 2966 - protein, 14 aa, synthetic construct
GSGSPHSKAQDLQT

SEQ ID NO: 2967 - protein, 14 aa, synthetic construct
GSGSPHSKAQAMHT

SEQ ID NO: 2968 - protein, 14 aa, synthetic construct
GSGSPHSKALNQQT

SEQ ID NO: 2969 - protein, 14 aa, synthetic construct
GSGSPHSKAQHPST

SEQ ID NO: 2970 - protein, 14 aa, synthetic construct
GSGSPHSKAPGLQT

SEQ ID NO: 2971 - protein, 14 aa, synthetic construct
GSGSPHSKAQGIRT

SEQ ID NO: 2972 - protein, 14 aa, synthetic construct
GSGSPHSKAQAPAT

SEQ ID NO: 2973 - protein, 14 aa, synthetic construct
GSGSPHSKSQSQQI

SEQ ID NO: 2974 - protein, 14 aa, synthetic construct
GSGSPHSKAQIPPT

SEQ ID NO: 2975 - protein, 14 aa, synthetic construct
GSGSPHSKAQTQLT

SEQ ID NO: 2976 - protein, 14 aa, synthetic construct
GSGSPHSKAQAPST

SEQ ID NO: 2977 - protein, 14 aa, synthetic construct
GSGSPHSKGQNQQT

SEQ ID NO: 2978 - protein, 14 aa, synthetic construct
ASGSPHSKAHNQQT

SEQ ID NO: 2979 - protein, 14 aa, synthetic construct
GSGSPHSKAQNTYA

SEQ ID NO: 2980 - protein, 14 aa, synthetic construct
GSGSPHSKSQNQHI

SEQ ID NO: 2981 - protein, 14 aa, synthetic construct
GSGSPHSKAQNHLT

SEQ ID NO: 2982 - protein, 14 aa, synthetic construct
GSGSPHSKAQIGMT

SEQ ID NO: 2983 - protein, 14 aa, synthetic construct
GSGSPHSKALNKQT

SEQ ID NO: 2984 - protein, 14 aa, synthetic construct
GSGSPHSKAQLQQT

SEQ ID NO: 2985 - protein, 14 aa, synthetic construct
GSGSPHSKAQRMST

SEQ ID NO: 2986 - protein, 14 aa, synthetic construct
GSGSPHSKAQGILT

SEQ ID NO: 2987 - protein, 14 aa, synthetic construct
GSGSPHSKAQDRQT

SEQ ID NO: 2988 - protein, 14 aa, synthetic construct
GSGSPHSKARDWQT

SEQ ID NO: 2989 - protein, 14 aa, synthetic construct
GSGSPHSKAQNTHD

SEQ ID NO: 2990 - protein, 14 aa, synthetic construct
GSGSPHSKAPNLQI

SEQ ID NO: 2991 - protein, 14 aa, synthetic construct
GSGSPHSKAQERST

SEQ ID NO: 2992 - protein, 14 aa, synthetic construct
GSGSPHSKAQNYQT

SEQ ID NO: 2993 - protein, 14 aa, synthetic construct
GSGSPHSKAQRTCT

SEQ ID NO: 2994 - protein, 14 aa, synthetic construct
GSGSPHSKAQIGHT

SEQ ID NO: 2995 - protein, 14 aa, synthetic construct
GSGSPHSKAQGAIT

SEQ ID NO: 2996 - protein, 14 aa, synthetic construct
GSGSPHSKAQVPPT

SEQ ID NO: 2997 - protein, 14 aa, synthetic construct
GSGSPHSKAQVQQI

SEQ ID NO: 2998 - protein, 14 aa, synthetic construct
GSGSPHSKALMRQT

SEQ ID NO: 2999 - protein, 14 aa, synthetic construct
GSGSPHSKAQYSVT

SEQ ID NO: 3000 - protein, 14 aa, synthetic construct
GSGSPHSKVPNLQT

SEQ ID NO: 3001 - protein, 14 aa, synthetic construct
GSGSPHSKAQSQQI

SEQ ID NO: 3002 - protein, 14 aa, synthetic construct
GSGSPHSKAQAITT

SEQ ID NO: 3003 - protein, 14 aa, synthetic construct
GSGSPHSKAQKTLT

SEQ ID NO: 3004 - protein, 14 aa, synthetic construct
GSGSPHSKAQNQWT

SEQ ID NO: 3005 - protein, 14 aa, synthetic construct
GSGSPHSKAQLHHT

SEQ ID NO: 3006 - protein, 14 aa, synthetic construct
GSGSPHSKAQNIII

SEQ ID NO: 3007 - protein, 14 aa, synthetic construct
GSGSPHSKAQGHHT

SEQ ID NO: 3008 - protein, 14 aa, synthetic construct
GSGSPHSKAQSKVT

SEQ ID NO: 3009 - protein, 14 aa, synthetic construct
GSGSPHSKAQLPST

SEQ ID NO: 3010 - protein, 14 aa, synthetic construct
GSGSPHSKAIGKQT

SEQ ID NO: 3011 - protein, 14 aa, synthetic construct
GSGSPHSKAQAIHT

SEQ ID NO: 3012 - protein, 14 aa, synthetic construct
GSGSPHSKAQHGLT

SEQ ID NO: 3013 - protein, 14 aa, synthetic construct
GSGSPHSKAQFMCT

SEQ ID NO: 3014 - protein, 14 aa, synthetic construct
VSGSPHSKAQGQQT

SEQ ID NO: 3015 - protein, 14 aa, synthetic construct
GSGSPHSKAQHLQT

SEQ ID NO: 3016 - protein, 14 aa, synthetic construct
GSGSPHSKTQNHQN

SEQ ID NO: 3017 - protein, 14 aa, synthetic construct
GSGSPHSKAQPART

SEQ ID NO: 3018 - protein, 14 aa, synthetic construct
GSGSPHSKAQSLQT

SEQ ID NO: 3019 - protein, 14 aa, synthetic construct
GSGSPHSKSQSQLT

SEQ ID NO: 3020 - protein, 14 aa, synthetic construct
GSGSPHSKAQDRQS

SEQ ID NO: 3021 - protein, 14 aa, synthetic construct
GSGSPHSKAQMPST

SEQ ID NO: 3022 - protein, 14 aa, synthetic construct
GSGSPHSKAQGSLT

SEQ ID NO: 3023 - protein, 14 aa, synthetic construct
GSGSPHSKSQNQQT

SEQ ID NO: 3024 - protein, 14 aa, synthetic construct
GSGSPHSKAQVPAT

SEQ ID NO: 3025 - protein, 14 aa, synthetic construct
GSGSPHSKAQDKQT

SEQ ID NO: 3026 - protein, 14 aa, synthetic construct
GSGSPHSKAHYQQT

SEQ ID NO: 3027 - protein, 14 aa, synthetic construct
GSGSPHSKAQVPST

SEQ ID NO: 3028 - protein, 14 aa, synthetic construct
GSGSPHSKARGEQT

SEQ ID NO: 3029 - protein, 14 aa, synthetic construct
GSGSPHSKAPGQQT

SEQ ID NO: 3030 - protein, 14 aa, synthetic construct
GSGSPHSKAQSLQI

SEQ ID NO: 3031 - protein, 14 aa, synthetic construct
GSGSPHSKRLEQQT

SEQ ID NO: 3032 - protein, 14 aa, synthetic construct
GSGSPHSKAQNQST

SEQ ID NO: 3033 - protein, 14 aa, synthetic construct
GSGSPHSKAQKVIT

SEQ ID NO: 3034 - protein, 14 aa, synthetic construct
GSGSPHSKAQNNDQ

SEQ ID NO: 3035 - protein, 14 aa, synthetic construct
GSGSPHSKAQSVHT

SEQ ID NO: 3036 - protein, 14 aa, synthetic construct
GSGSPHSKAQPLGT

SEQ ID NO: 3037 - protein, 14 aa, synthetic construct
GSGSPHSKAHNQET

SEQ ID NO: 3038 - protein, 14 aa, synthetic construct
GSGSPHSKAQNLQI

SEQ ID NO: 3039 - protein, 14 aa, synthetic construct
GSGSPHSKAQIQQT

SEQ ID NO: 3040 - protein, 14 aa, synthetic construct
GSGSPHSKAQVRNT

SEQ ID NO: 3041 - protein, 14 aa, synthetic construct
GSGSPHSKAPSNQT

SEQ ID NO: 3042 - protein, 14 aa, synthetic construct
GSGSPHSKAQVGHT

SEQ ID NO: 3043 - protein, 14 aa, synthetic construct
GSGSPHSKAQRDIT

SEQ ID NO: 3044 - protein, 14 aa, synthetic construct
GSGSPHSKAQMPNT

SEQ ID NO: 3045 - protein, 14 aa, synthetic construct
GSGSPHSKARGLQT

SEQ ID NO: 3046 - protein, 14 aa, synthetic construct
GSGSPHSKLQKQQT

SEQ ID NO: 3047 - protein, 14 aa, synthetic construct
GSGSPHSKAPSLQT

SEQ ID NO: 3048 - protein, 14 aa, synthetic construct
GSGSPHSKAQRDQT

SEQ ID NO: 3049 - protein, 14 aa, synthetic construct
GSGSPHSKNRDQQT

SEQ ID NO: 3050 - protein, 14 aa, synthetic construct
GSGSPHSKAQAKGT

SEQ ID NO: 3051 - protein, 14 aa, synthetic construct
GSGSPHSKAQSAHT

SEQ ID NO: 3052 - protein, 14 aa, synthetic construct
GSGSPHSKSQNHQT

SEQ ID NO: 3053 - protein, 14 aa, synthetic construct
RSGSPHSKAQDQQT

SEQ ID NO: 3054 - protein, 14 aa, synthetic construct
GSGSPHSKAQSTMT

SEQ ID NO: 3055 - protein, 14 aa, synthetic construct
GSGSPHSKAQREMT

SEQ ID NO: 3056 - protein, 14 aa, synthetic construct
GSGSPHSKAQYRAT

SEQ ID NO: 3057 - protein, 14 aa, synthetic construct
GSGSPHSKNQWQQT

SEQ ID NO: 3058 - protein, 14 aa, synthetic construct
GSGSPHSKAQRMNT

SEQ ID NO: 3059 - protein, 14 aa, synthetic construct
GSGSPHAKAQNHQT

SEQ ID NO: 3060 - protein, 14 aa, synthetic construct
GSGSPHSKAGDSQT

SEQ ID NO: 3061 - protein, 14 aa, synthetic construct
GSGSPHSKLKSQQT

SEQ ID NO: 3062 - protein, 14 aa, synthetic construct
GSGSPHSKAQKIST

SEQ ID NO: 3063 - protein, 14 aa, synthetic construct
GSGSPHSKAPSMQT

SEQ ID NO: 3064 - protein, 14 aa, synthetic construct
GSGSPHSKASPRQT

SEQ ID NO: 3065 - protein, 14 aa, synthetic construct
GSGSPHSKRMEQQT

SEQ ID NO: 3066 - protein, 14 aa, synthetic construct
GSGSPHSKAQYQNT

SEQ ID NO: 3067 - protein, 14 aa, synthetic construct
RSGSPHSKAQNQQI

SEQ ID NO: 3068 - protein, 14 aa, synthetic construct
GSGSPHTKAQNPPT

SEQ ID NO: 3069 - protein, 14 aa, synthetic construct
GSGSPHTKAQNQQT

SEQ ID NO: 3070 - protein, 14 aa, synthetic construct
ASGSPHSKAQHQQT

SEQ ID NO: 3071 - protein, 14 aa, synthetic construct
ASGSPHSKAINQQT

SEQ ID NO: 3072 - protein, 14 aa, synthetic construct
GSGSPHSKAPNQQH

SEQ ID NO: 3073 - protein, 14 aa, synthetic construct
ASGSPHSKAQNHQT

SEQ ID NO: 3074 - protein, 14 aa, synthetic construct
GSGSPHSKAENRQT

SEQ ID NO: 3075 - protein, 14 aa, synthetic construct
GSGSPHSKVQDQQT

SEQ ID NO: 3076 - protein, 14 aa, synthetic construct
GSGSPHSKAQTQQA

SEQ ID NO: 3077 - protein, 14 aa, synthetic construct
GSGSPHSKAQNQAT

SEQ ID NO: 3078 - protein, 14 aa, synthetic construct
GHDSPHKSGQIRQT

SEQ ID NO: 3079 - protein, 14 aa, synthetic construct
GHDSPHKIGQNQHA

SEQ ID NO: 3080 - protein, 14 aa, synthetic construct
GYDSPHKSGQKQQT

SEQ ID NO: 3081 - protein, 14 aa, synthetic construct
GHDSPHKSGQNQQT

SEQ ID NO: 3082 - protein, 14 aa, synthetic construct
GHDSPHKSGQSVQT

SEQ ID NO: 3083 - protein, 14 aa, synthetic construct
GHESPHKSGRSQQT

SEQ ID NO: 3084 - protein, 14 aa, synthetic construct
GHDSPHKSGQNKLE

SEQ ID NO: 3085 - protein, 14 aa, synthetic construct
GHDSPHKTGQNQQK

SEQ ID NO: 3086 - protein, 14 aa, synthetic construct
GRGSPHKRGQNQQT

SEQ ID NO: 3087 - protein, 14 aa, synthetic construct
GHDNPHKSGQNQQT

SEQ ID NO: 3088 - protein, 14 aa, synthetic construct
GQDSPHKSGQHQQA

SEQ ID NO: 3089 - protein, 14 aa, synthetic construct
GHDSPHKSGQIQHT

SEQ ID NO: 3090 - protein, 14 aa, synthetic construct
GHDSPHKSGPRQQT

SEQ ID NO: 3091 - protein, 14 aa, synthetic construct
GHDSPHKSGHTQQT

SEQ ID NO: 3092 - protein, 14 aa, synthetic construct
GHDSPHKSGQRQHT

SEQ ID NO: 3093 - protein, 14 aa, synthetic construct
GHDSPHKSAQSQQT

SEQ ID NO: 3094 - protein, 14 aa, synthetic construct
GHESPHKSGQNQQS

SEQ ID NO: 3095 - protein, 14 aa, synthetic construct
GHDSPHKSLQNQQT

SEQ ID NO: 3096 - protein, 14 aa, synthetic construct
GHDSPHKSGRNQET

SEQ ID NO: 3097 - protein, 14 aa, synthetic construct
GHDSPHKSGQTQLT

SEQ ID NO: 3098 - protein, 14 aa, synthetic construct
GHDSPHKSEKNQQT

SEQ ID NO: 3099 - protein, 14 aa, synthetic construct
GRDSPHKSGQDQQT

SEQ ID NO: 3100 - protein, 14 aa, synthetic construct
GHDSPHKTGHNQQT

SEQ ID NO: 3101 - protein, 14 aa, synthetic construct
AHDSPHKSGQNQLT

SEQ ID NO: 3102 - protein, 14 aa, synthetic construct
GYDSPHKSGQTQQT

SEQ ID NO: 3103 - protein, 14 aa, synthetic construct
GHESPHKSGQTQQI

SEQ ID NO: 3104 - protein, 14 aa, synthetic construct
GHDSPHKSGQSKQA

SEQ ID NO: 3105 - protein, 14 aa, synthetic construct
GHESPHKSGQNQQT

SEQ ID NO: 3106 - protein, 14 aa, synthetic construct
GHDSPHKTGQNQPP

SEQ ID NO: 3107 - protein, 14 aa, synthetic construct
GHDSPHKSGQSPQT

SEQ ID NO: 3108 - protein, 14 aa, synthetic construct
GNDSPHKSVQNQQT

SEQ ID NO: 3109 - protein, 14 aa, synthetic construct
GHDSPHKSAQNYQT

SEQ ID NO: 3110 - protein, 14 aa, synthetic construct
AHDSPHKIGQNHQT

SEQ ID NO: 3111 - protein, 14 aa, synthetic construct
GHESPHKSAQNRQT

SEQ ID NO: 3112 - protein, 14 aa, synthetic construct
GHDSPHKSGQNQQG

SEQ ID NO: 3113 - protein, 14 aa, synthetic construct
GQDSPHKIGQNQQT

SEQ ID NO: 3114 - protein, 14 aa, synthetic construct
GHDSPHKSGQNHLT

SEQ ID NO: 3115 - protein, 14 aa, synthetic construct
GHDSPHKSGQYQHT

SEQ ID NO: 3116 - protein, 14 aa, synthetic construct
GNDSPHKSVQNHQT

SEQ ID NO: 3117 - protein, 14 aa, synthetic construct
GHDSPHKSGQNQWT

SEQ ID NO: 3118 - protein, 14 aa, synthetic construct
GHDSPHKSVQNQHT

SEQ ID NO: 3119 - protein, 14 aa, synthetic construct
GHDSPHKSGQNQHA

SEQ ID NO: 3120 - protein, 14 aa, synthetic construct
GHDSPHKSGQTRQT

SEQ ID NO: 3121 - protein, 14 aa, synthetic construct
GHDSPHKSGQNLHT

SEQ ID NO: 3122 - protein, 14 aa, synthetic construct
GHDSPHKSGLNQQT

SEQ ID NO: 3123 - protein, 14 aa, synthetic construct
GHDSPHKSAQNQET

SEQ ID NO: 3124 - protein, 14 aa, synthetic construct
GHDSPHKSGQHLQT

SEQ ID NO: 3125 - protein, 14 aa, synthetic construct
GHDSPHKSRLNQPT

SEQ ID NO: 3126 - protein, 14 aa, synthetic construct
GHDSPHKSGQKQQT

SEQ ID NO: 3127 - protein, 14 aa, synthetic construct
GQDSPHKSGQNQDT

SEQ ID NO: 3128 - protein, 14 aa, synthetic construct
GHDSPHKSGRNQQT

SEQ ID NO: 3129 - protein, 14 aa, synthetic construct
GHDSPHKSGQNLLT

SEQ ID NO: 3130 - protein, 14 aa, synthetic construct
GHDSPHKSGQLVIT

SEQ ID NO: 3131 - protein, 14 aa, synthetic construct
GHDSPHKSRQSQQT

SEQ ID NO: 3132 - protein, 14 aa, synthetic construct
GHDSPHKSGRTQET

SEQ ID NO: 3133 - protein, 14 aa, synthetic construct
GHDSPHKSVQTHQT

SEQ ID NO: 3134 - protein, 14 aa, synthetic construct
GHDSPHKSGQNQPA

SEQ ID NO: 3135 - protein, 14 aa, synthetic construct
KHDSPHKSGQNQQT

SEQ ID NO: 3136 - protein, 14 aa, synthetic construct
GHDSPHKSGQTQQT

SEQ ID NO: 3137 - protein, 14 aa, synthetic construct
GPDSPHKIGQNQQS

SEQ ID NO: 3138 - protein, 14 aa, synthetic construct
GHDSPHKSVQNQQT

SEQ ID NO: 3139 - protein, 14 aa, synthetic construct
GHDSPHKSRQDQHT

SEQ ID NO: 3140 - protein, 14 aa, synthetic construct
GPDSPHKSGQKQQT

SEQ ID NO: 3141 - protein, 14 aa, synthetic construct
GHDSPHKSRQSQHT

SEQ ID NO: 3142 - protein, 14 aa, synthetic construct
GHDSPHKSVQNQLT

SEQ ID NO: 3143 - protein, 14 aa, synthetic construct
AHDSPHKSGQNQQT

SEQ ID NO: 3144 - protein, 14 aa, synthetic construct
GQDSPHKSGQNQQS

SEQ ID NO: 3145 - protein, 14 aa, synthetic construct
GHDSPHKSGRNQQI

SEQ ID NO: 3146 - protein, 14 aa, synthetic construct
GYDSPHKSGQYQHT

SEQ ID NO: 3147 - protein, 14 aa, synthetic construct
GHDSPHKSRQNQQT

SEQ ID NO: 3148 - protein, 14 aa, synthetic construct
GHDSPHKSWVRQQT

SEQ ID NO: 3149 - protein, 14 aa, synthetic construct
GHESPHKSGQNQHS

SEQ ID NO: 3150 - protein, 14 aa, synthetic construct
GHDSPHKIGHNQQT

SEQ ID NO: 3151 - protein, 14 aa, synthetic construct
WHDSPHKSGQNQQT

SEQ ID NO: 3152 - protein, 14 aa, synthetic construct
RHDSPHKSGQNQQT

SEQ ID NO: 3153 - protein, 14 aa, synthetic construct
GHDSPHKSNAWQQT

SEQ ID NO: 3154 - protein, 14 aa, synthetic construct
GHDSPHKSGQSVPT

SEQ ID NO: 3155 - protein, 14 aa, synthetic construct
GHESPHKSGQNIQP

SEQ ID NO: 3156 - protein, 14 aa, synthetic construct
GHDSPHKSVQNHLN

SEQ ID NO: 3157 - protein, 14 aa, synthetic construct
GHDSPHKIGLDQQT

SEQ ID NO: 3158 - protein, 14 aa, synthetic construct
GHDSPHKRGPDQQS

SEQ ID NO: 3159 - protein, 14 aa, synthetic construct
GHDSPHKSGESQQT

SEQ ID NO: 3160 - protein, 14 aa, synthetic construct
GHDSPHKHGQNHQT

SEQ ID NO: 3161 - protein, 14 aa, synthetic construct
LHDSPHKSGQNQQT

SEQ ID NO: 3162 - protein, 14 aa, synthetic construct
GHDSPHKSVQNKQT

SEQ ID NO: 3163 - protein, 14 aa, synthetic construct
GQVSPHKSGQNQQT

SEQ ID NO: 3164 - protein, 14 aa, synthetic construct
GHDSPHKSGQRQLT

SEQ ID NO: 3165 - protein, 14 aa, synthetic construct
GHDSPHKIGQNQLT

SEQ ID NO: 3166 - protein, 14 aa, synthetic construct
GHDSPHKSGQIIVT

SEQ ID NO: 3167 - protein, 14 aa, synthetic construct
IHDSPHKSGQNQQT

SEQ ID NO: 3168 - protein, 14 aa, synthetic construct
GYDSPHKSGQKQST

SEQ ID NO: 3169 - protein, 14 aa, synthetic construct
MHDSPHKSGQNQQT

SEQ ID NO: 3170 - protein, 14 aa, synthetic construct
GDDSPHKSVQNQQT

SEQ ID NO: 3171 - protein, 14 aa, synthetic construct
GHDSPHKSVQSHQT

SEQ ID NO: 3172 - protein, 14 aa, synthetic construct
GHDSPHKSGQFVVT

SEQ ID NO: 3173 - protein, 14 aa, synthetic construct
GHDSPHKSRQNLQT

SEQ ID NO: 3174 - protein, 14 aa, synthetic construct
GHNSPHKSGQNQET

SEQ ID NO: 3175 - protein, 14 aa, synthetic construct
GHDSPHKSAQNQQI

SEQ ID NO: 3176 - protein, 14 aa, synthetic construct
NHDSPHKSGQNQQT

SEQ ID NO: 3177 - protein, 14 aa, synthetic construct
GHDSPHKSGQSQPT

SEQ ID NO: 3178 - protein, 14 aa, synthetic construct
GHESPHKSGQNEQT

SEQ ID NO: 3179 - protein, 14 aa, synthetic construct
GHDSPHKSAQNQQT

SEQ ID NO: 3180 - protein, 14 aa, synthetic construct
GHDSPHKSGQNQLT

SEQ ID NO: 3181 - protein, 14 aa, synthetic construct
GHDSPHKSAQNLLT

SEQ ID NO: 3182 - protein, 14 aa, synthetic construct
THDSPHKSGQNQQT

SEQ ID NO: 3183 - protein, 14 aa, synthetic construct
GNGSPHKRGQNQQT

SEQ ID NO: 3184 - protein, 14 aa, synthetic construct
GHDSPHKSGQSLQT

SEQ ID NO: 3185 - protein, 14 aa, synthetic construct
GHDSPHKSAQNHQT

SEQ ID NO: 3186 - protein, 14 aa, synthetic construct
GHDSPHKSGRNRQT

SEQ ID NO: 3187 - protein, 14 aa, synthetic construct
EHDSPHKSGQNQQT

SEQ ID NO: 3188 - protein, 14 aa, synthetic construct
GHDSPHKYGQNEQT

SEQ ID NO: 3189 - protein, 14 aa, synthetic construct
RHDSPHKSGHNQQT

SEQ ID NO: 3190 - protein, 14 aa, synthetic construct
GHDSPHKSQQNQQT

SEQ ID NO: 3191 - protein, 14 aa, synthetic construct
GHDSPHKSGQNQQI

SEQ ID NO: 3192 - protein, 14 aa, synthetic construct
QHDSPHKSGQNQQT

SEQ ID NO: 3193 - protein, 14 aa, synthetic construct
RHDSPHKIVQNQQT

SEQ ID NO: 3194 - protein, 14 aa, synthetic construct
YHDSPHKSGQNQQT

SEQ ID NO: 3195 - protein, 14 aa, synthetic construct
GHDSPHKSVQSKQT

SEQ ID NO: 3196 - protein, 14 aa, synthetic construct
GNDSPHKIGHNQQT

SEQ ID NO: 3197 - protein, 14 aa, synthetic construct
HHDSPHKSGQNQQT

SEQ ID NO: 3198 - protein, 14 aa, synthetic construct
GHDSPHKSGQTQQI

SEQ ID NO: 3199 - protein, 14 aa, synthetic construct
GQDSPHKSGQNPLT

SEQ ID NO: 3200 - protein, 14 aa, synthetic construct
GHDSPHKSGRDQKT

SEQ ID NO: 3201 - protein, 14 aa, synthetic construct
GHDSPHKSVHNQQN

SEQ ID NO: 3202 - protein, 14 aa, synthetic construct
GHDSPHKSGQWKRT

SEQ ID NO: 3203 - protein, 14 aa, synthetic construct
GHDSPHKSGQSQQI

SEQ ID NO: 3204 - protein, 14 aa, synthetic construct
GHDSPHKSRQAQQT

SEQ ID NO: 3205 - protein, 14 aa, synthetic construct
GHDSPHKSVQNHQI

SEQ ID NO: 3206 - protein, 14 aa, synthetic construct
GHDSPHKSKQNQQA

SEQ ID NO: 3207 - protein, 14 aa, synthetic construct
GHDSPHKSAQNQLN

SEQ ID NO: 3208 - protein, 14 aa, synthetic construct
GHDSPHKSGQTQPT

SEQ ID NO: 3209 - protein, 14 aa, synthetic construct
FHDSPHKSGQNQQT

SEQ ID NO: 3210 - protein, 14 aa, synthetic construct
GHDSPHKLWINQQT

SEQ ID NO: 3211 - protein, 14 aa, synthetic construct
GPDSPHKSGQNQQT

SEQ ID NO: 3212 - protein, 14 aa, synthetic construct
GHDSPHKSVQKQLT

SEQ ID NO: 3213 - protein, 14 aa, synthetic construct
GHDSPHKSGRNQLA

SEQ ID NO: 3214 - protein, 14 aa, synthetic construct
VHDSPHKSGQNQQS

SEQ ID NO: 3215 - protein, 14 aa, synthetic construct
GHDSPHKMGRNQQS

SEQ ID NO: 3216 - protein, 14 aa, synthetic construct
GHDSPHKSGISIQT

SEQ ID NO: 3217 - protein, 14 aa, synthetic construct
VHDSPHKSGQNQQT

SEQ ID NO: 3218 - protein, 14 aa, synthetic construct
GHDSPHKSVQNLQT

SEQ ID NO: 3219 - protein, 14 aa, synthetic construct
GHDSPHKMAHNQQT

SEQ ID NO: 3220 - protein, 14 aa, synthetic construct
GHDSPHKHGQNQQN

SEQ ID NO: 3221 - protein, 14 aa, synthetic construct
GHDSPHKSVQSQQS

SEQ ID NO: 3222 - protein, 14 aa, synthetic construct
GHDSPHKSGQTVCT

SEQ ID NO: 3223 - protein, 14 aa, synthetic construct
GQDSPHKSGQYQQI

SEQ ID NO: 3224 - protein, 14 aa, synthetic construct
GHDSPHKSGQQIMT

SEQ ID NO: 3225 - protein, 14 aa, synthetic construct
GHDSPHKSRQNEQS

SEQ ID NO: 3226 - protein, 14 aa, synthetic construct
GHDSPHKSGLNHQT

SEQ ID NO: 3227 - protein, 14 aa, synthetic construct
GYDSPHKSGQNQQT

SEQ ID NO: 3228 - protein, 14 aa, synthetic construct
GHDSPHKSGQNLQT

SEQ ID NO: 3229 - protein, 14 aa, synthetic construct
GHDSPHKSRQDQQT

SEQ ID NO: 3230 - protein, 14 aa, synthetic construct
GDDSPHKSGQKQLT

SEQ ID NO: 3231 - protein, 14 aa, synthetic construct
GDDSPHKSGHNQQT

SEQ ID NO: 3232 - protein, 14 aa, synthetic construct
GHDSPHKSGQMIHT

SEQ ID NO: 3233 - protein, 14 aa, synthetic construct
GHDSPHKSGRNHQS

SEQ ID NO: 3234 - protein, 14 aa, synthetic construct
GHDSPHKSVQNRQT

SEQ ID NO: 3235 - protein, 14 aa, synthetic construct
GHDSPHKSGQKMNT

SEQ ID NO: 3236 - protein, 14 aa, synthetic construct
GHDSPHKSGQSQQN

SEQ ID NO: 3237 - protein, 14 aa, synthetic construct
GHDSPHKSGQYQHA

SEQ ID NO: 3238 - skipped

SEQ ID NO: 3239 - protein, 18 aa, synthetic construct
KTIIGSGSPHSKAQNRHT

SEQ ID NO: 3240 - protein, 18 aa, synthetic construct
KTFPGSGSPHSKVQNQQT

SEQ ID NO: 3241 - protein, 18 aa, synthetic construct
KTEKMSGSPHSKAQNQQT

SEQ ID NO: 3242 - protein, 18 aa, synthetic construct
KTVNGSGSPHSKARDQQT

SEQ ID NO: 3243 - protein, 18 aa, synthetic construct
KTFNGSGSPHSKAPNLQT

SEQ ID NO: 3244 - protein, 18 aa, synthetic construct
KTEKTSGSPHSKAQNQQT

SEQ ID NO: 3245 - protein, 18 aa, synthetic construct
KTINGSGSPHSKAHVRQT

SEQ ID NO: 3246 - protein, 18 aa, synthetic construct
KTVNGSGSPHSKAPNQHT

SEQ ID NO: 3247 - protein, 18 aa, synthetic construct
KTEKISGSPHSKAQNQQT

SEQ ID NO: 3248 - protein, 18 aa, synthetic construct
KTVNGSGSPHSKTQSQQT

SEQ ID NO: 3249 - protein, 18 aa, synthetic construct
TTINGSGSPHSKAQNQQT

SEQ ID NO: 3250 - protein, 18 aa, synthetic construct
KSINESGSPHSKAQNQQI

SEQ ID NO: 3251 - protein, 18 aa, synthetic construct
KTERTSGSPHSKAQNQQT

SEQ ID NO: 3252 - protein, 18 aa, synthetic construct
KTINGSGSPHSKAQPAKT

SEQ ID NO: 3253 - protein, 18 aa, synthetic construct
KTEKSSGSPHSKAQNQQT

SEQ ID NO: 3254 - protein, 18 aa, synthetic construct
KTEKGSGSPHSKAQNQQT

SEQ ID NO: 3255 - protein, 18 aa, synthetic construct
KTINGSGSPHSKSQTQQN

SEQ ID NO: 3256 - protein, 18 aa, synthetic construct
KTERISGSPHSKAQNQQT

SEQ ID NO: 3257 - protein, 18 aa, synthetic construct
KTERASGSPHSKAQNQQT

SEQ ID NO: 3258 - protein, 18 aa, synthetic construct
KELHGSGSPHSKAQNQQT

SEQ ID NO: 3259 - protein, 18 aa, synthetic construct
KAINGSGSPHSKAQNLAT

SEQ ID NO: 3260 - protein, 18 aa, synthetic construct
KTVNGSGSPHSKSQNQLT

SEQ ID NO: 3261 - protein, 18 aa, synthetic construct
KTERNSGSPHSKAQNQQT

SEQ ID NO: 3262 - protein, 18 aa, synthetic construct
KTFNGSGSPHSKAQGQQT

SEQ ID NO: 3263 - protein, 18 aa, synthetic construct
KTERVSGSPHSKAQNQQT

SEQ ID NO: 3264 - protein, 18 aa, synthetic construct
KTINGSGSPHSKALNRQS

SEQ ID NO: 3265 - protein, 18 aa, synthetic construct
KTERLSGSPHSKAQNQQT

SEQ ID NO: 3266 - protein, 18 aa, synthetic construct
KTDNGSGSPHSKAHNQQT

SEQ ID NO: 3267 - protein, 18 aa, synthetic construct
KTFHGSGSPHSKTQNQQT

SEQ ID NO: 3268 - protein, 18 aa, synthetic construct
KTSNGSGSPHSKAQNPPT

SEQ ID NO: 3269 - protein, 18 aa, synthetic construct
ETINGSGSPHSKAQNLQT

SEQ ID NO: 3270 - protein, 18 aa, synthetic construct
NTINGSGSPHSKAQNQQT

SEQ ID NO: 3271 - protein, 18 aa, synthetic construct
KTENMSGSPHSKAQNQQT

SEQ ID NO: 3272 - protein, 18 aa, synthetic construct
KTENVSGSPHSKAQNQQT

SEQ ID NO: 3273 - protein, 18 aa, synthetic construct
KTSSGSGSPHSKAQYQQT

SEQ ID NO: 3274 - protein, 18 aa, synthetic construct
KTEKVSGSPHSKAQNQQT

SEQ ID NO: 3275 - protein, 18 aa, synthetic construct
KAINGSGSPHSKAQDQET

SEQ ID NO: 3276 - protein, 18 aa, synthetic construct
KTCNKSGSPHSKAQNQQT

SEQ ID NO: 3277 - protein, 18 aa, synthetic construct
KTEHLSGSPHSKAQNQQT

SEQ ID NO: 3278 - protein, 18 aa, synthetic construct
KAEMGSGSPHSKAQNQQT

SEQ ID NO: 3279 - protein, 18 aa, synthetic construct
KATNGSGSPHSKAQNHQT

SEQ ID NO: 3280 - protein, 18 aa, synthetic construct
KAIKGSGSPHSKAQDQQT

SEQ ID NO: 3281 - protein, 18 aa, synthetic construct
KTINGSGSPHSKGHWQQT

SEQ ID NO: 3282 - protein, 18 aa, synthetic construct
KTDKTSGSPHSKAQNQQT

SEQ ID NO: 3283 - protein, 18 aa, synthetic construct
KTFKGSGSPHSKAPNQQT

SEQ ID NO: 3284 - protein, 18 aa, synthetic construct
KTVNGSGSPHSKAQNQLI

SEQ ID NO: 3285 - protein, 18 aa, synthetic construct
KTINGSGSPHSKRPEQQT

SEQ ID NO: 3286 - protein, 18 aa, synthetic construct
KTINGSGSPHSKAQRTMT

SEQ ID NO: 3287 - protein, 18 aa, synthetic construct
KTEKASGSPHSKAQNQQT

SEQ ID NO: 3288 - protein, 18 aa, synthetic construct
KSDQGSGSPHSKAQNQQT

SEQ ID NO: 3289 - protein, 18 aa, synthetic construct
KTEITSGSPHSKAQNQQT

SEQ ID NO: 3290 - protein, 18 aa, synthetic construct
KTDKSSGSPHSKAQNQQT

SEQ ID NO: 3291 - protein, 18 aa, synthetic construct
KTIDGSGSPHSKAQNQQH

SEQ ID NO: 3292 - protein, 18 aa, synthetic construct
KNTNGSGSPHSKAQNQQT

SEQ ID NO: 3293 - protein, 18 aa, synthetic construct
KTETHSGSPHSKAQNQQT

SEQ ID NO: 3294 - protein, 18 aa, synthetic construct
KTINGSGSPHSKALHQHT

SEQ ID NO: 3295 - protein, 18 aa, synthetic construct
KTINGSGSPHSKAQHRIT

SEQ ID NO: 3296 - protein, 18 aa, synthetic construct
KTINGSGSPHSKAQYIHT

SEQ ID NO: 3297 - protein, 18 aa, synthetic construct
KTENISGSPHSKAQNQQT

SEQ ID NO: 3298 - protein, 18 aa, synthetic construct
KTINGSGSPHSKAQKFET

SEQ ID NO: 3299 - protein, 18 aa, synthetic construct
KTSNESGSPHSKAQNHQT

SEQ ID NO: 3300 - protein, 18 aa, synthetic construct
KTINGSGSPHSKAQFPST

SEQ ID NO: 3301 - protein, 18 aa, synthetic construct
KTERPSGSPHSKAQNQQT

SEQ ID NO: 3302 - protein, 18 aa, synthetic construct
KTERMSGSPHSKAQNQQT

SEQ ID NO: 3303 - protein, 18 aa, synthetic construct
KTERSSGSPHSKAQNQQT

SEQ ID NO: 3304 - protein, 18 aa, synthetic construct
KTELHSGSPHSKAQNQQT

SEQ ID NO: 3305 - protein, 18 aa, synthetic construct
KTELTSGSPHSKAQNQQT

SEQ ID NO: 3306 - protein, 18 aa, synthetic construct
KTINGSGSPHSKAHNQQR

SEQ ID NO: 3307 - protein, 18 aa, synthetic construct
KTINGSGSPHSKAQAIKT

SEQ ID NO: 3308 - protein, 18 aa, synthetic construct
KTENTSGSPHSKAQNQQT

SEQ ID NO: 3309 - protein, 18 aa, synthetic construct
KTIDGSGSPHSKGQNRQT

SEQ ID NO: 3310 - protein, 18 aa, synthetic construct
KNINGSGSPHSKAQSQQT

SEQ ID NO: 3311 - protein, 18 aa, synthetic construct
KTSNASGSPHSKAQNQLT

SEQ ID NO: 3312 - protein, 18 aa, synthetic construct
KTEARSGSPHSKAQNQQT

SEQ ID NO: 3313 - protein, 18 aa, synthetic construct
KTEKNSGSPHSKAQNQQT

SEQ ID NO: 3314 - protein, 18 aa, synthetic construct
KTANGSGSPHSKAQYQQT

SEQ ID NO: 3315 - protein, 18 aa, synthetic construct
KTVNGSGSPHSKAQYQHT

SEQ ID NO: 3316 - protein, 18 aa, synthetic construct
KTINGSGSPHTKAQNPQS

SEQ ID NO: 3317 - protein, 18 aa, synthetic construct
KTINGSGSPHSKGQNPPT

SEQ ID NO: 3318 - protein, 18 aa, synthetic construct
KTIIGSGSPHSKAQHQLT

SEQ ID NO: 3319 - protein, 18 aa, synthetic construct
KTINGSGSPHSKAQSPPT

SEQ ID NO: 3320 - protein, 18 aa, synthetic construct
NTIYGSGSPHSKAQNQQT

SEQ ID NO: 3321 - protein, 18 aa, synthetic construct
KTINGSGSPHSKAQAKLT

SEQ ID NO: 3322 - protein, 18 aa, synthetic construct
KTDKNSGSPHSKAQNQQT

SEQ ID NO: 3323 - protein, 18 aa, synthetic construct
KTINGSGSPHSKTKSQQT

SEQ ID NO: 3324 - protein, 18 aa, synthetic construct
KTINGSGSPHSKAQDRPT

SEQ ID NO: 3325 - protein, 18 aa, synthetic construct
KTINGSGSPHSKAQSQQL

SEQ ID NO: 3326 - protein, 18 aa, synthetic construct
KTENLSGSPHSKAQNQQT

SEQ ID NO: 3327 - protein, 18 aa, synthetic construct
KTINGSGSPHSKAQAFHT

SEQ ID NO: 3328 - protein, 18 aa, synthetic construct
KTINGSGSPHSKAQKQQD

SEQ ID NO: 3329 - protein, 18 aa, synthetic construct
KTFSGSGSPHSKAQNLQT

SEQ ID NO: 3330 - protein, 18 aa, synthetic construct
KAINGSGSPHSKAQNAQT

SEQ ID NO: 3331 - protein, 18 aa, synthetic construct
KTESWSGSPHSKAQNQQT

SEQ ID NO: 3332 - protein, 18 aa, synthetic construct
KTTNGSGSPHSKAHNQLT

SEQ ID NO: 3333 - protein, 18 aa, synthetic construct
KTEDKSGSPHSKAQNQQT

SEQ ID NO: 3334 - protein, 18 aa, synthetic construct
KTESASGSPHSKAQNQQT

SEQ ID NO: 3335 - protein, 18 aa, synthetic construct
KTNNGSGSPHSKAQNQQY

SEQ ID NO: 3336 - protein, 18 aa, synthetic construct
KTDKMSGSPHSKAQNQQT

SEQ ID NO: 3337 - protein, 18 aa, synthetic construct
KEVHGSGSPHSKAQNQQT

SEQ ID NO: 3338 - protein, 18 aa, synthetic construct
KTINGSGSPHSKAQKLNT

SEQ ID NO: 3339 - protein, 18 aa, synthetic construct
KTTNGSGSPHSKAQYQHT

SEQ ID NO: 3340 - protein, 18 aa, synthetic construct
KTISGSGSPHSKAQYQHT

SEQ ID NO: 3341 - protein, 18 aa, synthetic construct
KTESTSGSPHSKAQNQQT

SEQ ID NO: 3342 - protein, 18 aa, synthetic construct
KTINGSGSPHSKSQNVQT

SEQ ID NO: 3343 - protein, 18 aa, synthetic construct
KSINGSGSPHSKAQAQQT

SEQ ID NO: 3344 - protein, 18 aa, synthetic construct
KTVNGSGSPHSKAQNLQA

SEQ ID NO: 3345 - protein, 18 aa, synthetic construct
KTVRDSGSPHSKAQNQQT

SEQ ID NO: 3346 - protein, 18 aa, synthetic construct
KTFNASGSPHSKAPNQQT

SEQ ID NO: 3347 - protein, 18 aa, synthetic construct
KTDRMSGSPHSKAQNQQT

SEQ ID NO: 3348 - protein, 18 aa, synthetic construct
KTINGSGSPHSKAQTPPT

SEQ ID NO: 3349 - protein, 18 aa, synthetic construct
ETIKGSGSPHSKAQNQQT

SEQ ID NO: 3350 - protein, 18 aa, synthetic construct
KNHIGSGSPHSKAQNQQT

SEQ ID NO: 3351 - protein, 18 aa, synthetic construct
KTINGSGSPHSKAQYQHA

SEQ ID NO: 3352 - protein, 18 aa, synthetic construct
KTINGSGSPHSKAQGQQA

SEQ ID NO: 3353 - protein, 18 aa, synthetic construct
KTFNGSGSPHNKAQNHQT

SEQ ID NO: 3354 - protein, 18 aa, synthetic construct
KESDGSGSPHSKAQNQQT

SEQ ID NO: 3355 - protein, 18 aa, synthetic construct
KTINGSGSPHSKAQPPAT

SEQ ID NO: 3356 - protein, 18 aa, synthetic construct
KTINGSGSPHSKAQERPT

SEQ ID NO: 3357 - protein, 18 aa, synthetic construct
KTIKGSGSPHSKAQDLQT

SEQ ID NO: 3358 - protein, 18 aa, synthetic construct
KTDLKSGSPHSKAQNQQT

SEQ ID NO: 3359 - protein, 18 aa, synthetic construct
KTINGSGSPHSKAQAMHT

SEQ ID NO: 3360 - protein, 18 aa, synthetic construct
KTVPNSGSPHSKAQNQQT

SEQ ID NO: 3361 - protein, 18 aa, synthetic construct
KTVIGSGSPHSKALNQQT

SEQ ID NO: 3362 - protein, 18 aa, synthetic construct
KTINGSGSPHSKAQHPST

SEQ ID NO: 3363 - protein, 18 aa, synthetic construct
KTINGSGSPHSKAPGLQT

SEQ ID NO: 3364 - protein, 18 aa, synthetic construct
KTINGSGSPHSKAQGIRT

SEQ ID NO: 3365 - protein, 18 aa, synthetic construct
KTESHSGSPHSKAQNQQT

SEQ ID NO: 3366 - protein, 18 aa, synthetic construct
KTINGSGSPHSKAQAPAT

SEQ ID NO: 3367 - protein, 18 aa, synthetic construct
KTINGSGSPHSKSQSQQI

SEQ ID NO: 3368 - protein, 18 aa, synthetic construct
KAEHGSGSPHSKAQNQQT

SEQ ID NO: 3369 - protein, 18 aa, synthetic construct
KTEDRSGSPHSKAQNQQT

SEQ ID NO: 3370 - protein, 18 aa, synthetic construct
KNCLGSGSPHSKAQNQQT

SEQ ID NO: 3371 - protein, 18 aa, synthetic construct
KTDRGSGSPHSKAQNQQT

SEQ ID NO: 3372 - protein, 18 aa, synthetic construct
KTINGSGSPHSKAQIPPT

SEQ ID NO: 3373 - protein, 18 aa, synthetic construct
KTVKGSGSPHSKAQDQQT

SEQ ID NO: 3374 - protein, 18 aa, synthetic construct
KNADGSGSPHSKAQNQQT

SEQ ID NO: 3375 - protein, 18 aa, synthetic construct
KTDKVSGSPHSKAQNQQT

SEQ ID NO: 3376 - protein, 18 aa, synthetic construct
KTITGSGSPHSKAQTQLT

SEQ ID NO: 3377 - protein, 18 aa, synthetic construct
KTINGSGSPHSKAQAPST

SEQ ID NO: 3378 - protein, 18 aa, synthetic construct
KNCVGSGSPHSKAQNQQT

SEQ ID NO: 3379 - protein, 18 aa, synthetic construct
KTVKDSGSPHSKAQNQQT

SEQ ID NO: 3380 - protein, 18 aa, synthetic construct
KNALGSGSPHSKAQNQQT

SEQ ID NO: 3381 - protein, 18 aa, synthetic construct
KVINGSGSPHSKGQNQQT

SEQ ID NO: 3382 - protein, 18 aa, synthetic construct
KTSNASGSPHSKAHNQQT

SEQ ID NO: 3383 - protein, 18 aa, synthetic construct
KTINGSGSPHSKAQNTYA

SEQ ID NO: 3384 - protein, 18 aa, synthetic construct
KTINGSGSPHSKSQNQHI

SEQ ID NO: 3385 - protein, 18 aa, synthetic construct
KTEFVSGSPHSKAQNQQT

SEQ ID NO: 3386 - protein, 18 aa, synthetic construct
KTVNGSGSPHSKAQNHLT

SEQ ID NO: 3387 - protein, 18 aa, synthetic construct
KTREISGSPHSKAQNQQT

SEQ ID NO: 3388 - protein, 18 aa, synthetic construct
KTINGSGSPHSKAQIGMT

SEQ ID NO: 3389 - protein, 18 aa, synthetic construct
KTIDGSGSPHSKALNKQT

SEQ ID NO: 3390 - protein, 18 aa, synthetic construct
KQGEGSGSPHSKAQNQQT

SEQ ID NO: 3391 - protein, 18 aa, synthetic construct
KTVNGSGSPHSKAQLQQT

SEQ ID NO: 3392 - protein, 18 aa, synthetic construct
KSINGSGSPHSKTQSQQT

SEQ ID NO: 3393 - protein, 18 aa, synthetic construct
KSEKGSGSPHSKAQNQQT

SEQ ID NO: 3394 - protein, 18 aa, synthetic construct
KNVNGSGSPHSKAQNQQT

SEQ ID NO: 3395 - protein, 18 aa, synthetic construct
KGGEGSGSPHSKAQNQQT

SEQ ID NO: 3396 - protein, 18 aa, synthetic construct
KTINGSGSPHSKAQRMST

SEQ ID NO: 3397 - protein, 18 aa, synthetic construct
KTINGSGSPHSKAQGILT

SEQ ID NO: 3398 - protein, 18 aa, synthetic construct
KEFVGSGSPHSKAQNQQT

SEQ ID NO: 3399 - protein, 18 aa, synthetic construct
KTIIGSGSPHSKAQDRQT

SEQ ID NO: 3400 - protein, 18 aa, synthetic construct
KSDKGSGSPHSKAQNQQT

SEQ ID NO: 3401 - protein, 18 aa, synthetic construct
KTEQVSGSPHSKAQNQQT

SEQ ID NO: 3402 - protein, 18 aa, synthetic construct
KTEHVSGSPHSKAQNQQT

SEQ ID NO: 3403 - protein, 18 aa, synthetic construct
KTINGSGSPHSKARDWQT

SEQ ID NO: 3404 - protein, 18 aa, synthetic construct
KTENASGSPHSKAQNQQT

SEQ ID NO: 3405 - protein, 18 aa, synthetic construct
KEVQGSGSPHSKAQNQQT

SEQ ID NO: 3406 - protein, 18 aa, synthetic construct
KTINGSGSPHSKAQNTHD

SEQ ID NO: 3407 - protein, 18 aa, synthetic construct
KTINGSGSPHSKAPNLQI

SEQ ID NO: 3408 - protein, 18 aa, synthetic construct
KTINGSGSPHSKAQERST

SEQ ID NO: 3409 - protein, 18 aa, synthetic construct
KTSNGSGSPHSKAQNYQT

SEQ ID NO: 3410 - protein, 18 aa, synthetic construct
KTEYISGSPHSKAQNQQT

SEQ ID NO: 3411 - protein, 18 aa, synthetic construct
KTINGSGSPHSKAQRTCT

SEQ ID NO: 3412 - protein, 18 aa, synthetic construct
KTINGSGSPHSKAQIGHT

SEQ ID NO: 3413 - protein, 18 aa, synthetic construct
KNCWGSGSPHSKAQNQQT

SEQ ID NO: 3414 - protein, 18 aa, synthetic construct
KTINGSGSPHSKAQGAIT

SEQ ID NO: 3415 - protein, 18 aa, synthetic construct
KTDVNSGSPHSKAQNQQT

SEQ ID NO: 3416 - protein, 18 aa, synthetic construct
KSDIGSGSPHSKAQNQQT

SEQ ID NO: 3417 - protein, 18 aa, synthetic construct
KTINGSGSPHSKAQVPPT

SEQ ID NO: 3418 - protein, 18 aa, synthetic construct
KTINGSGSPHSKAQVQQI

SEQ ID NO: 3419 - protein, 18 aa, synthetic construct
KTINGSGSPHSKALMRQT

SEQ ID NO: 3420 - protein, 18 aa, synthetic construct
KTINGSGSPHSKAQYSVT

SEQ ID NO: 3421 - protein, 18 aa, synthetic construct
KNSIGSGSPHSKAQNQQT

SEQ ID NO: 3422 - protein, 18 aa, synthetic construct
KTINGSGSPHSKVPNLQT

SEQ ID NO: 3423 - protein, 18 aa, synthetic construct
KAINGSGSPHSKAQSQQI

SEQ ID NO: 3424 - protein, 18 aa, synthetic construct
KTINGSGSPHSKAQAITT

SEQ ID NO: 3425 - protein, 18 aa, synthetic construct
KTINGSGSPHSKAQKTLT

SEQ ID NO: 3426 - protein, 18 aa, synthetic construct
KTVNGSGSPHSKAQNQWT

SEQ ID NO: 3427 - protein, 18 aa, synthetic construct
KTINGSGSPHSKAQLHHT

SEQ ID NO: 3428 - protein, 18 aa, synthetic construct
KTEQTSGSPHSKAQNQQT

SEQ ID NO: 3429 - protein, 18 aa, synthetic construct
KTINGSGSPHSKAQNIII

SEQ ID NO: 3430 - protein, 18 aa, synthetic construct
KNSLGSGSPHSKAQNQQT

SEQ ID NO: 3431 - protein, 18 aa, synthetic construct
KTINGSGSPHSKAQGHHT

SEQ ID NO: 3432 - protein, 18 aa, synthetic construct
KTDRTSGSPHSKAQNQQT

SEQ ID NO: 3433 - protein, 18 aa, synthetic construct
KTINGSGSPHSKAQSKVT

SEQ ID NO: 3434 - protein, 18 aa, synthetic construct
KEVVGSGSPHSKAQNQQT

SEQ ID NO: 3435 - protein, 18 aa, synthetic construct
KTINGSGSPHSKAQLPST

SEQ ID NO: 3436 - protein, 18 aa, synthetic construct
KTINGSGSPHSKAIGKQT

SEQ ID NO: 3437 - protein, 18 aa, synthetic construct
KTEPTSGSPHSKAQNQQT

SEQ ID NO: 3438 - protein, 18 aa, synthetic construct
KTINGSGSPHSKAQAIHT

SEQ ID NO: 3439 - protein, 18 aa, synthetic construct
KTINGSGSPHSKAQHGLT

SEQ ID NO: 3440 - protein, 18 aa, synthetic construct
KSELGSGSPHSKAQNQQT

SEQ ID NO: 3441 - protein, 18 aa, synthetic construct
KTINGSGSPHSKAQFMCT

SEQ ID NO: 3442 - protein, 18 aa, synthetic construct
KTINVSGSPHSKAQGQQT

SEQ ID NO: 3443 - protein, 18 aa, synthetic construct
KTVNGSGSPHSKAQHLQT

SEQ ID NO: 3444 - protein, 18 aa, synthetic construct
KTINGSGSPHSKTQNHQN

SEQ ID NO: 3445 - protein, 18 aa, synthetic construct
KTINGSGSPHSKAQPART

SEQ ID NO: 3446 - protein, 18 aa, synthetic construct
KTVNGSGSPHSKAQSLQT

SEQ ID NO: 3447 - protein, 18 aa, synthetic construct
KTINGSGSPHSKSQSQLT

SEQ ID NO: 3448 - protein, 18 aa, synthetic construct
KTWQNSGSPHSKAQNQQT

SEQ ID NO: 3449 - protein, 18 aa, synthetic construct
KTINGSGSPHSKAQDRQS

SEQ ID NO: 3450 - protein, 18 aa, synthetic construct
KTINGSGSPHSKAQMPST

SEQ ID NO: 3451 - protein, 18 aa, synthetic construct
KTINGSGSPHSKAQGSLT

SEQ ID NO: 3452 - protein, 18 aa, synthetic construct
KTEVTSGSPHSKAQNQQT

SEQ ID NO: 3453 - protein, 18 aa, synthetic construct
KTVIGSGSPHSKSQNQQT

SEQ ID NO: 3454 - protein, 18 aa, synthetic construct
KAVNVSGSPHSKAQNQQT

SEQ ID NO: 3455 - protein, 18 aa, synthetic construct
KTDRNSGSPHSKAQNQQT

SEQ ID NO: 3456 - protein, 18 aa, synthetic construct
KTINGSGSPHSKAQVPAT

SEQ ID NO: 3457 - protein, 18 aa, synthetic construct
KGVLGSGSPHSKAQNQQT

SEQ ID NO: 3458 - protein, 18 aa, synthetic construct
KAINGSGSPHSKAQDKQT

SEQ ID NO: 3459 - protein, 18 aa, synthetic construct
KTSNGSGSPHSKAHYQQT

SEQ ID NO: 3460 - protein, 18 aa, synthetic construct
KTINGSGSPHSKAQVPST

SEQ ID NO: 3461 - protein, 18 aa, synthetic construct
KTELRSGSPHSKAQNQQT

SEQ ID NO: 3462 - protein, 18 aa, synthetic construct
KNINGSGSPHSKAQNHQT

SEQ ID NO: 3463 - protein, 18 aa, synthetic construct
KTINGSGSPHSKARGEQT

SEQ ID NO: 3464 - protein, 18 aa, synthetic construct
KTEDLSGSPHSKAQNQQT

SEQ ID NO: 3465 - protein, 18 aa, synthetic construct
KTINGSGSPHSKAPGQQT

SEQ ID NO: 3466 - protein, 18 aa, synthetic construct
KTINGSGSPHSKAQSLQI

SEQ ID NO: 3467 - protein, 18 aa, synthetic construct
KTINGSGSPHSKRLEQQT

SEQ ID NO: 3468 - protein, 18 aa, synthetic construct
KTERGSGSPHSKAQNQQT

SEQ ID NO: 3469 - protein, 18 aa, synthetic construct
KTVNGSGSPHSKAPNQQT

SEQ ID NO: 3470 - protein, 18 aa, synthetic construct
KTSNGSGSPHSKAQNQST

SEQ ID NO: 3471 - protein, 18 aa, synthetic construct
KTINGSGSPHSKAQKVIT

SEQ ID NO: 3472 - protein, 18 aa, synthetic construct
KTEGISGSPHSKAQNQQT

SEQ ID NO: 3473 - protein, 18 aa, synthetic construct
KTINGSGSPHSKAQNNDQ

SEQ ID NO: 3474 - protein, 18 aa, synthetic construct
KTINGSGSPHSKAQSVHT

SEQ ID NO: 3475 - protein, 18 aa, synthetic construct
KTINGSGSPHSKAQPLGT

SEQ ID NO: 3476 - protein, 18 aa, synthetic construct
KTCNASGSPHSKAQNQQT

SEQ ID NO: 3477 - protein, 18 aa, synthetic construct
KAINGSGSPHSKAHNQET

SEQ ID NO: 3478 - protein, 18 aa, synthetic construct
KTEGLSGSPHSKAQNQQT

SEQ ID NO: 3479 - protein, 18 aa, synthetic construct
KTRDASGSPHSKAQNQQT

SEQ ID NO: 3480 - protein, 18 aa, synthetic construct
KTSNGSGSPHSKAQNLQI

SEQ ID NO: 3481 - protein, 18 aa, synthetic construct
KTGNGSGSPHSKAQIQQT

SEQ ID NO: 3482 - protein, 18 aa, synthetic construct
KTDRSSGSPHSKAQNQQT

SEQ ID NO: 3483 - protein, 18 aa, synthetic construct
KTINGSGSPHSKAQVRNT

SEQ ID NO: 3484 - protein, 18 aa, synthetic construct
KTINGSGSPHSKAPSNQT

SEQ ID NO: 3485 - protein, 18 aa, synthetic construct
KTINGSGSPHSKAQVGHT

SEQ ID NO: 3486 - protein, 18 aa, synthetic construct
KNAIGSGSPHSKAQNQQT

SEQ ID NO: 3487 - protein, 18 aa, synthetic construct
KAENGSGSPHSKAQNQQT

SEQ ID NO: 3488 - protein, 18 aa, synthetic construct
KTINGSGSPHSKAQRDIT

SEQ ID NO: 3489 - protein, 18 aa, synthetic construct
KTINGSGSPHSKAQMPNT

SEQ ID NO: 3490 - protein, 18 aa, synthetic construct
KTVNGSGSPHSKSQNQQT

SEQ ID NO: 3491 - protein, 18 aa, synthetic construct
KTINGSGSPHSKARGLQT

SEQ ID NO: 3492 - protein, 18 aa, synthetic construct
KTELGSGSPHSKAQNQQT

SEQ ID NO: 3493 - protein, 18 aa, synthetic construct
KAETGSGSPHSKAQNQQT

SEQ ID NO: 3494 - protein, 18 aa, synthetic construct
KTINGSGSPHSKLQKQQT

SEQ ID NO: 3495 - protein, 18 aa, synthetic construct
KTINGSGSPHSKAPSLQT

SEQ ID NO: 3496 - protein, 18 aa, synthetic construct
KTINGSGSPHSKAQRDQT

SEQ ID NO: 3497 - protein, 18 aa, synthetic construct
KTDVGSGSPHSKAQNQQT

SEQ ID NO: 3498 - protein, 18 aa, synthetic construct
KTINGSGSPHSKNRDQQT

SEQ ID NO: 3499 - protein, 18 aa, synthetic construct
KSINGSGSPHSKAPNLQT

SEQ ID NO: 3500 - protein, 18 aa, synthetic construct
KTINGSGSPHSKAQAKGT

SEQ ID NO: 3501 - protein, 18 aa, synthetic construct
KTVNGSGSPHSKAQDKQT

SEQ ID NO: 3502 - protein, 18 aa, synthetic construct
KTINGSGSPHSKAQSAHT

SEQ ID NO: 3503 - protein, 18 aa, synthetic construct
KTVPTSGSPHSKAQNQQT

SEQ ID NO: 3504 - protein, 18 aa, synthetic construct
KTIDGSGSPHSKSQNHQT

SEQ ID NO: 3505 - protein, 18 aa, synthetic construct
KTDVKSGSPHSKAQNQQT

SEQ ID NO: 3506 - protein, 18 aa, synthetic construct
KAINRSGSPHSKAQDQQT

SEQ ID NO: 3507 - protein, 18 aa, synthetic construct
KTINGSGSPHSKAQSTMT

SEQ ID NO: 3508 - protein, 18 aa, synthetic construct
KTVNASGSPHSKAQNQLT

SEQ ID NO: 3509 - protein, 18 aa, synthetic construct
KTINGSGSPHSKAQREMT

SEQ ID NO: 3510 - protein, 18 aa, synthetic construct
KTVHGSGSPHSKAQSQQT

SEQ ID NO: 3511 - protein, 18 aa, synthetic construct
KTINGSGSPHSKAQYRAT

SEQ ID NO: 3512 - protein, 18 aa, synthetic construct
KTEPMSGSPHSKAQNQQT

SEQ ID NO: 3513 - protein, 18 aa, synthetic construct
KTINGSGSPHSKNQWQQT

SEQ ID NO: 3514 - protein, 18 aa, synthetic construct
KETAGSGSPHSKAQNQQT

SEQ ID NO: 3515 - protein, 18 aa, synthetic construct
KTINGSGSPHSKAQRMNT

SEQ ID NO: 3516 - protein, 18 aa, synthetic construct
KNNLGSGSPHSKAQNQQT

SEQ ID NO: 3517 - protein, 18 aa, synthetic construct
KTINGSGSPHAKAQNHQT

SEQ ID NO: 3518 - protein, 18 aa, synthetic construct
KTINGSGSPHSKAGDSQT

SEQ ID NO: 3519 - protein, 18 aa, synthetic construct
KTINGSGSPHSKLKSQQT

SEQ ID NO: 3520 - protein, 18 aa, synthetic construct
KTINGSGSPHSKAQKIST

SEQ ID NO: 3521 - protein, 18 aa, synthetic construct
KTEYNSGSPHSKAQNQQT

SEQ ID NO: 3522 - protein, 18 aa, synthetic construct
KTINGSGSPHSKAPSMQT

SEQ ID NO: 3523 - protein, 18 aa, synthetic construct
EAINGSGSPHSKAQNQQT

SEQ ID NO: 3524 - protein, 18 aa, synthetic construct
KTINGSGSPHSKASPRQT

SEQ ID NO: 3525 - protein, 18 aa, synthetic construct
KTINGSGSPHSKRMEQQT

SEQ ID NO: 3526 - protein, 18 aa, synthetic construct
KTINGSGSPHSKAQYQNT

SEQ ID NO: 3527 - protein, 18 aa, synthetic construct
KEINGRGSPHSKAQNQQT

SEQ ID NO: 3528 - protein, 18 aa, synthetic construct
KTVNRNGSPHSKAQNQQT

SEQ ID NO: 3529 - protein, 18 aa, synthetic construct
KTINGPGSPHSKAHNQQT

SEQ ID NO: 3530 - protein, 18 aa, synthetic construct
KTSYGNGSPHSKAQNQQT

SEQ ID NO: 3531 - protein, 18 aa, synthetic construct
KSVNGNGSPHSKAQNQQT

SEQ ID NO: 3532 - protein, 18 aa, synthetic construct
KTINGSGSPHGWVQNQQT

SEQ ID NO: 3533 - protein, 18 aa, synthetic construct
KTINGGGSPHSKAQTQQI

SEQ ID NO: 3534 - protein, 18 aa, synthetic construct
KTVHGNGSPHSKAQNQQT

SEQ ID NO: 3535 - protein, 18 aa, synthetic construct
KTINGGGSPHSKAQNQQC

SEQ ID NO: 3536 - protein, 18 aa, synthetic construct
KTIDGGGSPHSKAQNKQT

SEQ ID NO: 3537 - protein, 18 aa, synthetic construct
KTINGGGSPHSKAQNQLI

SEQ ID NO: 3538 - protein, 18 aa, synthetic construct
KNINGGGSPHSKAQNQQT

SEQ ID NO: 3539 - protein, 18 aa, synthetic construct
KTINGGGSPHSKSQNQLT

SEQ ID NO: 3540 - protein, 18 aa, synthetic construct
KTVNGNGSPHSKAQNKQT

SEQ ID NO: 3541 - protein, 18 aa, synthetic construct
KTVNGNGSPHSKAQNQHT

SEQ ID NO: 3542 - protein, 18 aa, synthetic construct
KTINGGGSPHSKALNQQN

SEQ ID NO: 3543 - protein, 18 aa, synthetic construct
KTINGTGSPHSKAQNHQI

SEQ ID NO: 3544 - protein, 18 aa, synthetic construct
KTIIGGGSPHSKAHNQQT

SEQ ID NO: 3545 - protein, 18 aa, synthetic construct
KTINGNGSPHSKAQNPLT

SEQ ID NO: 3546 - protein, 18 aa, synthetic construct
KSIKGNGSPHSKAQNQQT

SEQ ID NO: 3547 - protein, 18 aa, synthetic construct
KTINGGGSPHSKAQSQQI

SEQ ID NO: 3548 - protein, 18 aa, synthetic construct
KTINGSVSPHGKAQNQLT

SEQ ID NO: 3549 - protein, 18 aa, synthetic construct
KTINGIGSPHSKAQNLGT

SEQ ID NO: 3550 - protein, 18 aa, synthetic construct
KTVNGNGSPHSKAQNHQT

SEQ ID NO: 3551 - protein, 18 aa, synthetic construct
KTSNGGGSPHSKAQNLQT

SEQ ID NO: 3552 - protein, 18 aa, synthetic construct
KTINGGGSPHSKSQNQHT

SEQ ID NO: 3553 - protein, 18 aa, synthetic construct
KTVNGGGSPHSKAQSQQT

SEQ ID NO: 3554 - protein, 18 aa, synthetic construct
KTIPIDGSPHSKAQNQQT

SEQ ID NO: 3555 - protein, 18 aa, synthetic construct
KTINGGGSPHSKAQNPPT

SEQ ID NO: 3556 - protein, 18 aa, synthetic construct
KTINGLGSPHSKSQNQQT

SEQ ID NO: 3557 - protein, 18 aa, synthetic construct
KTINGTGSPHSKAQNQQM

SEQ ID NO: 3558 - protein, 18 aa, synthetic construct
KTIRDAGSPHSKAQNQQT

SEQ ID NO: 3559 - protein, 18 aa, synthetic construct
KTVNGGGSPHSKAQNQQS

SEQ ID NO: 3560 - protein, 18 aa, synthetic construct
KTIQDGGSPHSKAQNQQT

SEQ ID NO: 3561 - protein, 18 aa, synthetic construct
KTISGGGSPHSKAQNQQN

SEQ ID NO: 3562 - protein, 18 aa, synthetic construct
KTINGGGSPHSKAQDKQT

SEQ ID NO: 3563 - protein, 18 aa, synthetic construct
KTIIGGGSPHSKAQNPQT

SEQ ID NO: 3564 - protein, 18 aa, synthetic construct
KTINGTGSPHSKAPNQLT

SEQ ID NO: 3565 - protein, 18 aa, synthetic construct
KTFNGGGSPHSKAQYQQT

SEQ ID NO: 3566 - protein, 18 aa, synthetic construct
KTVNGGGSPHSKAQHQQT

SEQ ID NO: 3567 - protein, 18 aa, synthetic construct
KTIPMEGSPHSKAQNQQT

SEQ ID NO: 3568 - protein, 18 aa, synthetic construct
KTVNGGGSPHSKSQNQQT

SEQ ID NO: 3569 - protein, 18 aa, synthetic construct
KTINGGGSPHSKAQNQMT

SEQ ID NO: 3570 - protein, 18 aa, synthetic construct
KTIRENGSPHSKAQNQQT

SEQ ID NO: 3571 - protein, 18 aa, synthetic construct
KTINGSASPHSKAHSQQT

SEQ ID NO: 3572 - protein, 18 aa, synthetic construct
KTNNGGGSPHSKAQNLQT

SEQ ID NO: 3573 - protein, 18 aa, synthetic construct
KSINGGGSPHSKAQYQQT

SEQ ID NO: 3574 - protein, 18 aa, synthetic construct
KTVNGNGSPHSKSQNQQT

SEQ ID NO: 3575 - protein, 18 aa, synthetic construct
KTLNGNGSPHSKAQNLQT

SEQ ID NO: 3576 - protein, 18 aa, synthetic construct
KTINGSGSSHSKAQNQQT

SEQ ID NO: 3577 - protein, 18 aa, synthetic construct
KTVNGGGSPHSKAQNHQT

SEQ ID NO: 3578 - protein, 18 aa, synthetic construct
KTINGGGSPHSKAQYQHT

SEQ ID NO: 3579 - protein, 18 aa, synthetic construct
KTIPKNGSPHSKAQNQQT

SEQ ID NO: 3580 - protein, 18 aa, synthetic construct
KTINKEGSPHSKAQNQQT

SEQ ID NO: 3581 - protein, 18 aa, synthetic construct
KTVNGGGSPHSKAQNLQT

SEQ ID NO: 3582 - protein, 18 aa, synthetic construct
KTIPAIGSPHSKAQNQQT

SEQ ID NO: 3583 - protein, 18 aa, synthetic construct
KTINGGGSPHSKAQNPQA

SEQ ID NO: 3584 - protein, 18 aa, synthetic construct
KTINGNGSPHSKSQNQHT

SEQ ID NO: 3585 - protein, 18 aa, synthetic construct
KTINGGGSPHSKSQNRQT

SEQ ID NO: 3586 - protein, 18 aa, synthetic construct
KTINGGGSPHSKAQRQQT

SEQ ID NO: 3587 - protein, 18 aa, synthetic construct
KTIIKNGSPHSKAQNQQT

SEQ ID NO: 3588 - protein, 18 aa, synthetic construct
KTINGSGSPHSYHVNQQT

SEQ ID NO: 3589 - protein, 18 aa, synthetic construct
KTERVSGSPHSKAQNQQT

SEQ ID NO: 3590 - skipped

SEQ ID NO: 3591 - protein, 18 aa, synthetic construct
KTFNRSGSPHSKAQNQQI

SEQ ID NO: 3592 - protein, 18 aa, synthetic construct
KTINGSGSPHTKAQNPPT

SEQ ID NO: 3593 - protein, 18 aa, synthetic construct
KSLNGSGSPHTKAQNQQT

SEQ ID NO: 3594 - protein, 18 aa, synthetic construct
KTENKSGSPHSKAQNQQT

SEQ ID NO: 3595 - protein, 18 aa, synthetic construct
KTDKGSGSPHSKAQNQQT

SEQ ID NO: 3596 - protein, 18 aa, synthetic construct
KTSNASGSPHSKAQHQQT

SEQ ID NO: 3597 - protein, 18 aa, synthetic construct
KTINASGSPHSKAINQQT

SEQ ID NO: 3598 - protein, 18 aa, synthetic construct
KTINGSGSPHSKAPNQQH

SEQ ID NO: 3599 - protein, 18 aa, synthetic construct
KTVNASGSPHSKAQNHQT

SEQ ID NO: 3600 - protein, 18 aa, synthetic construct
KTIDGSGSPHSKAENRQT

SEQ ID NO: 3601 - protein, 18 aa, synthetic construct
KTIKGSGSPHSKVQDQQT

SEQ ID NO: 3602 - protein, 18 aa, synthetic construct
KAINGSGSPHSKAQTQQA

SEQ ID NO: 3603 - protein, 18 aa, synthetic construct
KTEAKSGSPHSKAQNQQT

SEQ ID NO: 3604 - protein, 18 aa, synthetic construct
KTIPGSGSPHSKAQNLQT

SEQ ID NO: 3605 - protein, 18 aa, synthetic construct
KTIHGSGSPHSKAQNQAT

SEQ ID NO: 3606 - protein, 18 aa, synthetic construct
KAINGHDSPHKSGQIRQT

SEQ ID NO: 3607 - protein, 18 aa, synthetic construct
KTINGHDSPHKIGQNQHA

SEQ ID NO: 3608 - protein, 18 aa, synthetic construct
KAINGYDSPHKSGQKQQT

SEQ ID NO: 3609 - protein, 18 aa, synthetic construct
KTESGHDSPHKSGQNQQT

SEQ ID NO: 3610 - protein, 18 aa, synthetic construct
KTINGHDSPHKSGQSVQT

SEQ ID NO: 3611 - protein, 18 aa, synthetic construct
TTINGHDSPHKSGQNQQT

SEQ ID NO: 3612 - protein, 18 aa, synthetic construct
KTINGHESPHKSGRSQQT

SEQ ID NO: 3613 - protein, 18 aa, synthetic construct
KTINGHDSPHKSGQNKLE

SEQ ID NO: 3614 - protein, 18 aa, synthetic construct
KTINGHDSPHKTGQNQQK

SEQ ID NO: 3615 - protein, 18 aa, synthetic construct
KAINGHDNPHKSGQNQQT

SEQ ID NO: 3616 - protein, 18 aa, synthetic construct
KTINGQDSPHKSGQHQQA

SEQ ID NO: 3617 - protein, 18 aa, synthetic construct
KSINGHDSPHKSGQIQHT

SEQ ID NO: 3618 - protein, 18 aa, synthetic construct
KAINGHDSPHKSGPRQQT

SEQ ID NO: 3619 - protein, 18 aa, synthetic construct
KTVNGHDSPHKSGHTQQT

SEQ ID NO: 3620 - protein, 18 aa, synthetic construct
KSINGHDSPHKSGQRQHT

SEQ ID NO: 3621 - protein, 18 aa, synthetic construct
KAINGHDSPHKSAQSQQT

SEQ ID NO: 3622 - protein, 18 aa, synthetic construct
KSIYGHESPHKSGQNQQS

SEQ ID NO: 3623 - protein, 18 aa, synthetic construct
KTVNGHDSPHKSLQNQQT

SEQ ID NO: 3624 - protein, 18 aa, synthetic construct
KTSNGYDSPHKSGQKQQT

SEQ ID NO: 3625 - protein, 18 aa, synthetic construct
KTVNGHDSPHKSGRNQET

SEQ ID NO: 3626 - protein, 18 aa, synthetic construct
KTTNGHDSPHKSGQTQLT

SEQ ID NO: 3627 - protein, 18 aa, synthetic construct
KAINGHDSPHKSEKNQQT

SEQ ID NO: 3628 - protein, 18 aa, synthetic construct
KIINGRDSPHKSGQDQQT

SEQ ID NO: 3629 - protein, 18 aa, synthetic construct
KTISGHDSPHKTGHNQQT

SEQ ID NO: 3630 - protein, 18 aa, synthetic construct
KTVNAHDSPHKSGQNQLT

SEQ ID NO: 3631 - protein, 18 aa, synthetic construct
KSINGYDSPHKSGQTQQT

SEQ ID NO: 3632 - protein, 18 aa, synthetic construct
KTINGHESPHKSGQTQQI

SEQ ID NO: 3633 - protein, 18 aa, synthetic construct
KTINGHDSPHKSGQSKQA

SEQ ID NO: 3634 - protein, 18 aa, synthetic construct
KAIIGHESPHKSGQNQQT

SEQ ID NO: 3635 - protein, 18 aa, synthetic construct
KTINGHDSPHKTGQNQPP

SEQ ID NO: 3636 - protein, 18 aa, synthetic construct
KAINGHDSPHKSGQSPQT

SEQ ID NO: 3637 - protein, 18 aa, synthetic construct
KTIKGNDSPHKSVQNQQT

SEQ ID NO: 3638 - protein, 18 aa, synthetic construct
KTEFGHDSPHKSGQNQQT

SEQ ID NO: 3639 - protein, 18 aa, synthetic construct
KTINGHDSPHKSAQNYQT

SEQ ID NO: 3640 - protein, 18 aa, synthetic construct
KTINAHDSPHKIGQNHQT

SEQ ID NO: 3641 - protein, 18 aa, synthetic construct
KTINGHESPHKSAQNRQT

SEQ ID NO: 3642 - protein, 18 aa, synthetic construct
KTTNGHDSPHKSGQNQQG

SEQ ID NO: 3643 - protein, 18 aa, synthetic construct
KTIKGQDSPHKIGQNQQT

SEQ ID NO: 3644 - protein, 18 aa, synthetic construct
KTVNGHDSPHKSGQNHLT

SEQ ID NO: 3645 - protein, 18 aa, synthetic construct
KSINGHDSPHKSGQYQHT

SEQ ID NO: 3646 - protein, 18 aa, synthetic construct
KTINGNDSPHKSVQNHQT

SEQ ID NO: 3647 - protein, 18 aa, synthetic construct
KTITGHDSPHKSGQNQWT

SEQ ID NO: 3648 - protein, 18 aa, synthetic construct
KTNNGHDSPHKSVQNQHT

SEQ ID NO: 3649 - protein, 18 aa, synthetic construct
KTIDGHDSPHKSGQNQHA

SEQ ID NO: 3650 - protein, 18 aa, synthetic construct
KTVNGHDSPHKSGQTRQT

SEQ ID NO: 3651 - protein, 18 aa, synthetic construct
KTVNGHDSPHKSGQNLHT

SEQ ID NO: 3652 - protein, 18 aa, synthetic construct
KAISGHDSPHKSGLNQQT

SEQ ID NO: 3653 - protein, 18 aa, synthetic construct
KAINGHDSPHKSAQNQET

SEQ ID NO: 3654 - protein, 18 aa, synthetic construct
KTITGHDSPHKSGQHLQT

SEQ ID NO: 3655 - protein, 18 aa, synthetic construct
KTINGHDSPHKSRLNQPT

SEQ ID NO: 3656 - protein, 18 aa, synthetic construct
KTVDGHDSPHKSGQKQQT

SEQ ID NO: 3657 - protein, 18 aa, synthetic construct
KTINGQDSPHKSGQNQDT

SEQ ID NO: 3658 - protein, 18 aa, synthetic construct
KTIEGHDSPHKSGRNQQT

SEQ ID NO: 3659 - protein, 18 aa, synthetic construct
KTTNGHDSPHKSGQNLLT

SEQ ID NO: 3660 - protein, 18 aa, synthetic construct
KTINGHDSPHKSGQLVIT

SEQ ID NO: 3661 - protein, 18 aa, synthetic construct
KTVNGHDSPHKSRQSQQT

SEQ ID NO: 3662 - protein, 18 aa, synthetic construct
KTINGHDSPHKSGRTQET

SEQ ID NO: 3663 - protein, 18 aa, synthetic construct
KTINGHDSPHKSVQTHQT

SEQ ID NO: 3664 - protein, 18 aa, synthetic construct
KTSNGHDSPHKSGQNQPA

SEQ ID NO: 3665 - protein, 18 aa, synthetic construct
KTEGKHDSPHKSGQNQQT

SEQ ID NO: 3666 - protein, 18 aa, synthetic construct
KVINGHDSPHKSGQTQQT

SEQ ID NO: 3667 - protein, 18 aa, synthetic construct
KTINGPDSPHKIGQNQQS

SEQ ID NO: 3668 - protein, 18 aa, synthetic construct
KAVNGHDSPHKSVQNQQT

SEQ ID NO: 3669 - protein, 18 aa, synthetic construct
KTINGHDSPHKSRQDQHT

SEQ ID NO: 3670 - protein, 18 aa, synthetic construct
KAINGPDSPHKSGQKQQT

SEQ ID NO: 3671 - protein, 18 aa, synthetic construct
KTINGHDSPHKSRQSQHT

SEQ ID NO: 3672 - protein, 18 aa, synthetic construct
KTIYGHDSPHKSVQNQLT

SEQ ID NO: 3673 - protein, 18 aa, synthetic construct
KTVNGHDSPHKSGQNLLT

SEQ ID NO: 3674 - protein, 18 aa, synthetic construct
KTESAHDSPHKSGQNQQT

SEQ ID NO: 3675 - protein, 18 aa, synthetic construct
KTTNGQDSPHKSGQNQQS

SEQ ID NO: 3676 - protein, 18 aa, synthetic construct
KTIDGHDSPHKSGRNQQI

SEQ ID NO: 3677 - protein, 18 aa, synthetic construct
KTINGYDSPHKSGQYQHT

SEQ ID NO: 3678 - protein, 18 aa, synthetic construct
KTDNGHDSPHKSRQNQQT

SEQ ID NO: 3679 - protein, 18 aa, synthetic construct
KTINGHDSPHKSWVRQQT

SEQ ID NO: 3680 - protein, 18 aa, synthetic construct
KTINGHESPHKSGQNQHS

SEQ ID NO: 3681 - protein, 18 aa, synthetic construct
KTVNGHDSPHKIGHNQQT

SEQ ID NO: 3682 - protein, 18 aa, synthetic construct
KTCNGHDSPHKSGRNQQT

SEQ ID NO: 3683 - protein, 18 aa, synthetic construct
KNVVGHDSPHKSGQNQQT

SEQ ID NO: 3684 - protein, 18 aa, synthetic construct
KTELWHDSPHKSGQNQQT

SEQ ID NO: 3685 - protein, 18 aa, synthetic construct
KTELRHDSPHKSGQNQQT

SEQ ID NO: 3686 - protein, 18 aa, synthetic construct
KTINGHDSPHKSNAWQQT

SEQ ID NO: 3687 - protein, 18 aa, synthetic construct
KTDAGHDSPHKSGQNQQT

SEQ ID NO: 3688 - protein, 18 aa, synthetic construct
KTEVGHDSPHKSGQNQQT

SEQ ID NO: 3689 - protein, 18 aa, synthetic construct
KTESRHDSPHKSGQNQQT

SEQ ID NO: 3690 - protein, 18 aa, synthetic construct
KSELGHDSPHKSGQNQQT

SEQ ID NO: 3691 - protein, 18 aa, synthetic construct
KTINGHDSPHKSGQSVPT

SEQ ID NO: 3692 - protein, 18 aa, synthetic construct
KTINGHESPHKSGQNIQP

SEQ ID NO: 3693 - protein, 18 aa, synthetic construct
KTEMKHDSPHKSGQNQQT

SEQ ID NO: 3694 - protein, 18 aa, synthetic construct
KTINGHDSPHKSVQNHLN

SEQ ID NO: 3695 - protein, 18 aa, synthetic construct
KTINGHDSPHKIGLDQQT

SEQ ID NO: 3696 - protein, 18 aa, synthetic construct
KTINGHDSPHKRGPDQQS

SEQ ID NO: 3697 - protein, 18 aa, synthetic construct
KTIKGHDSPHKSGESQQT

SEQ ID NO: 3698 - protein, 18 aa, synthetic construct
KTEGWHDSPHKSGQNQQT

SEQ ID NO: 3699 - protein, 18 aa, synthetic construct
KTINGHDSPHKHGQNHQT

SEQ ID NO: 3700 - protein, 18 aa, synthetic construct
KTEQLHDSPHKSGQNQQT

SEQ ID NO: 3701 - protein, 18 aa, synthetic construct
KTIIGHDSPHKSGQYQHT

SEQ ID NO: 3702 - protein, 18 aa, synthetic construct
KTSNGHDSPHKSVQNKQT

SEQ ID NO: 3703 - protein, 18 aa, synthetic construct
KIVNGQVSPHKSGQNQQT

SEQ ID NO: 3704 - protein, 18 aa, synthetic construct
KTVNGHDSPHKSGQRQLT

SEQ ID NO: 3705 - protein, 18 aa, synthetic construct
KTVNGHDSPHKIGQNQLT

SEQ ID NO: 3706 - protein, 18 aa, synthetic construct
KTINGHDSPHKSGQIIVT

SEQ ID NO: 3707 - protein, 18 aa, synthetic construct
KTEKIHDSPHKSGQNQQT

SEQ ID NO: 3708 - protein, 18 aa, synthetic construct
KTENAHDSPHKSGQNQQT

SEQ ID NO: 3709 - protein, 18 aa, synthetic construct
KIGNGHESPHKSGQNQQT

SEQ ID NO: 3710 - protein, 18 aa, synthetic construct
KEVMGHDSPHKSGQNQQT

SEQ ID NO: 3711 - protein, 18 aa, synthetic construct
KTEVKHDSPHKSGQNQQT

SEQ ID NO: 3712 - protein, 18 aa, synthetic construct
KTINGYDSPHKSGQKQST

SEQ ID NO: 3713 - protein, 18 aa, synthetic construct
KYQVGHDSPHKSGQNQQT

SEQ ID NO: 3714 - protein, 18 aa, synthetic construct
KTEAMHDSPHKSGQNQQT

SEQ ID NO: 3715 - protein, 18 aa, synthetic construct
KTIKGDDSPHKSVQNQQT

SEQ ID NO: 3716 - protein, 18 aa, synthetic construct
KTINGHDSPHKSVQSHQT

SEQ ID NO: 3717 - protein, 18 aa, synthetic construct
KTINGHDSPHKSGQFVVT

SEQ ID NO: 3718 - protein, 18 aa, synthetic construct
KTVNGHDSPHKSRQNLQT

SEQ ID NO: 3719 - protein, 18 aa, synthetic construct
KATNGHNSPHKSGQNQET

SEQ ID NO: 3720 - protein, 18 aa, synthetic construct
KAINGHDSPHKSAQNQQI

SEQ ID NO: 3721 - protein, 18 aa, synthetic construct
KTEHGHDSPHKSGQNQQT

SEQ ID NO: 3722 - protein, 18 aa, synthetic construct
KTVENHDSPHKSGQNQQT

SEQ ID NO: 3723 - protein, 18 aa, synthetic construct
KTIYGHDSPHKSGQSQPT

SEQ ID NO: 3724 - protein, 18 aa, synthetic construct
KTISGHESPHKSGQNEQT

SEQ ID NO: 3725 - protein, 18 aa, synthetic construct
KAIIGHDSPHKSAQNQQT

SEQ ID NO: 3726 - protein, 18 aa, synthetic construct
KAIDGHDSPHKSGQNQLT

SEQ ID NO: 3727 - protein, 18 aa, synthetic construct
KTIMGHDSPHKSVQNQQT

SEQ ID NO: 3728 - protein, 18 aa, synthetic construct
KEVGGHDSPHKSGQNQQT

SEQ ID NO: 3729 - protein, 18 aa, synthetic construct
KTINGHDSPHKSAQNLLT

SEQ ID NO: 3730 - protein, 18 aa, synthetic construct
KTEFTHDSPHKSGQNQQT

SEQ ID NO: 3731 - protein, 18 aa, synthetic construct
KSEMGHDSPHKSGQNQQT

SEQ ID NO: 3732 - protein, 18 aa, synthetic construct
KAQQGHDSPHKSGQNQQT

SEQ ID NO: 3733 - protein, 18 aa, synthetic construct
KTEVMHDSPHKSGQNQQT

SEQ ID NO: 3734 - protein, 18 aa, synthetic construct
KAINGHDSPHKSGQSLQT

SEQ ID NO: 3735 - protein, 18 aa, synthetic construct
KCGEGHDSPHKSGQNQQT

SEQ ID NO: 3736 - protein, 18 aa, synthetic construct
KTVNGHDSPHKSAQNHQT

SEQ ID NO: 3737 - protein, 18 aa, synthetic construct
KTVNGHDSPHKSGQTQLT

SEQ ID NO: 3738 - protein, 18 aa, synthetic construct
KTNNGHDSPHKSGRNRQT

SEQ ID NO: 3739 - protein, 18 aa, synthetic construct
KTCNEHDSPHKSGQNQQT

SEQ ID NO: 3740 - protein, 18 aa, synthetic construct
KTINGHDSPHKYGQNEQT

SEQ ID NO: 3741 - protein, 18 aa, synthetic construct
KASNRHDSPHKSGHNQQT

SEQ ID NO: 3742 - protein, 18 aa, synthetic construct
KTETKHDSPHKSGQNQQT

SEQ ID NO: 3743 - protein, 18 aa, synthetic construct
KSINGHDSPHKSQQNQQT

SEQ ID NO: 3744 - protein, 18 aa, synthetic construct
KTIGGHDSPHKSGQNQQI

SEQ ID NO: 3745 - protein, 18 aa, synthetic construct
KTDPQHDSPHKSGQNQQT

SEQ ID NO: 3746 - protein, 18 aa, synthetic construct
KTINRHDSPHKIVQNQQT

SEQ ID NO: 3747 - protein, 18 aa, synthetic construct
KTEQYHDSPHKSGQNQQT

SEQ ID NO: 3748 - protein, 18 aa, synthetic construct
KTINGHDSPHKSVQSKQT

SEQ ID NO: 3749 - protein, 18 aa, synthetic construct
KELVGHDSPHKSGQNQQT

SEQ ID NO: 3750 - protein, 18 aa, synthetic construct
KTENRHDSPHKSGQNQQT

SEQ ID NO: 3751 - protein, 18 aa, synthetic construct
KELMGHDSPHKSGQNQQT

SEQ ID NO: 3752 - protein, 18 aa, synthetic construct
KTINGNDSPHKIGHNQQT

SEQ ID NO: 3753 - protein, 18 aa, synthetic construct
KTEGHHDSPHKSGQNQQT

SEQ ID NO: 3754 - protein, 18 aa, synthetic construct
KTEGYHDSPHKSGQNQQT

SEQ ID NO: 3755 - protein, 18 aa, synthetic construct
KTVNGHDSPHKSGQTQQI

SEQ ID NO: 3756 - protein, 18 aa, synthetic construct
KTINGQDSPHKSGQNPLT

SEQ ID NO: 3757 - protein, 18 aa, synthetic construct
KTINGHDSPHKSGRDQKT

SEQ ID NO: 3758 - protein, 18 aa, synthetic construct
KTINGHDSPHKSVHNQQN

SEQ ID NO: 3759 - protein, 18 aa, synthetic construct
KTINGHDSPHKSGQWKRT

SEQ ID NO: 3760 - protein, 18 aa, synthetic construct
KNEIGHDSPHKSGQNQQT

SEQ ID NO: 3761 - protein, 18 aa, synthetic construct
KAINGHDSPHKSGQSQQI

SEQ ID NO: 3762 - protein, 18 aa, synthetic construct
KIINGHDSPHKSRQAQQT

SEQ ID NO: 3763 - protein, 18 aa, synthetic construct
KTPNGHDSPHKSGQNQQI

SEQ ID NO: 3764 - protein, 18 aa, synthetic construct
KITNGHDSPHKSGQTQQT

SEQ ID NO: 3765 - protein, 18 aa, synthetic construct
KTINGHDSPHKSVQNHQI

SEQ ID NO: 3766 - protein, 18 aa, synthetic construct
KTINGHDSPHKSKQNQQA

SEQ ID NO: 3767 - protein, 18 aa, synthetic construct
KTINGHDSPHKSAQNQLN

SEQ ID NO: 3768 - protein, 18 aa, synthetic construct
KTDITHDSPHKSGQNQQT

SEQ ID NO: 3769 - protein, 18 aa, synthetic construct
KTVNGHDSPHKSGQTQPT

SEQ ID NO: 3770 - protein, 18 aa, synthetic construct
KTEKFHDSPHKSGQNQQT

SEQ ID NO: 3771 - protein, 18 aa, synthetic construct
KTDQGHDSPHKSGQNQQT

SEQ ID NO: 3772 - protein, 18 aa, synthetic construct
KTINGHDSPHKLWINQQT

SEQ ID NO: 3773 - protein, 18 aa, synthetic construct
KGINGPDSPHKSGQNQQT

SEQ ID NO: 3774 - protein, 18 aa, synthetic construct
KSEIGHDSPHKSGQNQQT

SEQ ID NO: 3775 - protein, 18 aa, synthetic construct
KTINGHDSPHKSVQKQLT

SEQ ID NO: 3776 - protein, 18 aa, synthetic construct
KTVNGHDSPHKSGRNQLA

SEQ ID NO: 3777 - protein, 18 aa, synthetic construct
KTNNVHDSPHKSGQNQQS

SEQ ID NO: 3778 - protein, 18 aa, synthetic construct
KSEKGHDSPHKSGQNQQT

SEQ ID NO: 3779 - protein, 18 aa, synthetic construct
KWSAGHDSPHKSGQNQQT

SEQ ID NO: 3780 - protein, 18 aa, synthetic construct
KELAGHDSPHKSGQNQQT

SEQ ID NO: 3781 - protein, 18 aa, synthetic construct
KTINGHDSPHKMGRNQQS

SEQ ID NO: 3782 - protein, 18 aa, synthetic construct
KTDQAHDSPHKSGQNQQT

SEQ ID NO: 3783 - protein, 18 aa, synthetic construct
KTETQHDSPHKSGQNQQT

SEQ ID NO: 3784 - protein, 18 aa, synthetic construct
KTEMTHDSPHKSGQNQQT

SEQ ID NO: 3785 - protein, 18 aa, synthetic construct
KTINGHDSPHKSGISIQT

SEQ ID NO: 3786 - protein, 18 aa, synthetic construct
KTDAVHDSPHKSGQNQQT

SEQ ID NO: 3787 - protein, 18 aa, synthetic construct
KTSNGHDSPHKSVQNLQT

SEQ ID NO: 3788 - protein, 18 aa, synthetic construct
KTEKYHDSPHKSGQNQQT

SEQ ID NO: 3789 - protein, 18 aa, synthetic construct
KQTQGHDSPHKSGQNQQT

SEQ ID NO: 3790 - protein, 18 aa, synthetic construct
KTINGHDSPHKMAHNQQT

SEQ ID NO: 3791 - protein, 18 aa, synthetic construct
KTINGHDSPHKHGQNQQN

SEQ ID NO: 3792 - protein, 18 aa, synthetic construct
KGADGHDSPHKSGQNQQT

SEQ ID NO: 3793 - protein, 18 aa, synthetic construct
KVGEGHDSPHKSGQNQQT

SEQ ID NO: 3794 - protein, 18 aa, synthetic construct
KANEGHDSPHKSGQNQQT

SEQ ID NO: 3795 - protein, 18 aa, synthetic construct
KTDTMHDSPHKSGQNQQT

SEQ ID NO: 3796 - protein, 18 aa, synthetic construct
KTINGHDSPHKSVQSQQS

SEQ ID NO: 3797 - protein, 18 aa, synthetic construct
KTCIAHDSPHKSGQNQQT

SEQ ID NO: 3798 - protein, 18 aa, synthetic construct
KTINGHDSPHKSGQTVCT

SEQ ID NO: 3799 - protein, 18 aa, synthetic construct
KELRGHDSPHKSGQNQQT

SEQ ID NO: 3800 - protein, 18 aa, synthetic construct
KCQIGHDSPHKSGQNQQT

SEQ ID NO: 3801 - protein, 18 aa, synthetic construct
KGVMGHDSPHKSGQNQQT

SEQ ID NO: 3802 - protein, 18 aa, synthetic construct
KACDGHDSPHKSGQNQQT

SEQ ID NO: 3803 - protein, 18 aa, synthetic construct
KTINGQDSPHKSGQYQQI

SEQ ID NO: 3804 - protein, 18 aa, synthetic construct
KTINGHDSPHKSGQQIMT

SEQ ID NO: 3805 - protein, 18 aa, synthetic construct
KTINGHDSPHKSRQNEQS

SEQ ID NO: 3806 - protein, 18 aa, synthetic construct
KASNGHDSPHKSGLNHQT

SEQ ID NO: 3807 - protein, 18 aa, synthetic construct
KTVNGHDSPHKSGQSQPT

SEQ ID NO: 3808 - protein, 18 aa, synthetic construct
KNELGHDSPHKSGQNQQT

SEQ ID NO: 3809 - protein, 18 aa, synthetic construct
KTETFHDSPHKSGQNQQT

SEQ ID NO: 3810 - protein, 18 aa, synthetic construct
KAAEGHDSPHKSGQNQQT

SEQ ID NO: 3811 - protein, 18 aa, synthetic construct
KGQNGHDSPHKSGQNQQT

SEQ ID NO: 3812 - protein, 18 aa, synthetic construct
KNEFGHDSPHKSGQNQQT

SEQ ID NO: 3813 - protein, 18 aa, synthetic construct
KTSIGYDSPHKSGQNQQT

SEQ ID NO: 3814 - protein, 18 aa, synthetic construct
KTDNGHDSPHKSGQNLQT

SEQ ID NO: 3815 - protein, 18 aa, synthetic construct
KTEGQHDSPHKSGQNQQT

SEQ ID NO: 3816 - protein, 18 aa, synthetic construct
KTITGHDSPHKSRQDQQT

SEQ ID NO: 3817 - protein, 18 aa, synthetic construct
KAEHGHDSPHKSGQNQQT

SEQ ID NO: 3818 - protein, 18 aa, synthetic construct
KTINGDDSPHKSGQKQLT

SEQ ID NO: 3819 - protein, 18 aa, synthetic construct
KCDQGHDSPHKSGQNQQT

SEQ ID NO: 3820 - protein, 18 aa, synthetic construct
KEILGHDSPHKSGQNQQT

SEQ ID NO: 3821 - protein, 18 aa, synthetic construct
KTERNHDSPHKSGQNQQT

SEQ ID NO: 3822 - protein, 18 aa, synthetic construct
KAINGDDSPHKSGHNQQT

SEQ ID NO: 3823 - protein, 18 aa, synthetic construct
KTSNGHNSPHKSGQNQET

SEQ ID NO: 3824 - protein, 18 aa, synthetic construct
KTINGHDSPHKSGQMIHT

SEQ ID NO: 3825 - protein, 18 aa, synthetic construct
KNAIGHDSPHKSGQNQQT

SEQ ID NO: 3826 - protein, 18 aa, synthetic construct
KTDKFHDSPHKSGQNQQT

SEQ ID NO: 3827 - protein, 18 aa, synthetic construct
KTEGFHDSPHKSGQNQQT

SEQ ID NO: 3828 - protein, 18 aa, synthetic construct
KVINGHDSPHKSGRNHQS

SEQ ID NO: 3829 - protein, 18 aa, synthetic construct
KTITGHDSPHKSVQNRQT

SEQ ID NO: 3830 - protein, 18 aa, synthetic construct
KTPDMHDSPHKSGQNQQT

SEQ ID NO: 3831 - protein, 18 aa, synthetic construct
KTINGHDSPHKSGQKMNT

SEQ ID NO: 3832 - protein, 18 aa, synthetic construct
KTELQHDSPHKSGQNQQT

SEQ ID NO: 3833 - protein, 18 aa, synthetic construct
KTIHGHDSPHKSGQSQQN

SEQ ID NO: 3834 - protein, 18 aa, synthetic construct
KTEIGHDSPHKSGQNQQT

SEQ ID NO: 3835 - protein, 18 aa, synthetic construct
KTINGHDSPHKSGQYQHA

SEQ ID NO: 3836 - protein, 18 aa, synthetic construct
KTELYHDSPHKSGQNQQT

SEQ ID NO: 3837 - protein, 18 aa, synthetic construct
KTINGRGSPHKRGQNQQT

SEQ ID NO: 3838 - protein, 18 aa, synthetic construct
KTINGHGSPHSKAQNPQT

SEQ ID NO: 3839 - protein, 18 aa, synthetic construct
KTFNGSASPHSKALNQQT

SEQ ID NO: 3840 - protein, 18 aa, synthetic construct
KTINGCGSPHASGQNQQT

SEQ ID NO: 3841 - protein, 18 aa, synthetic construct
KTINGNGSPHSKAQNHQA

SEQ ID NO: 3842 - protein, 18 aa, synthetic construct
KTINGMGSPHSKTQNQQT

SEQ ID NO: 3843 - protein, 18 aa, synthetic construct
KTVNGTGSPHSKAQNQLT

SEQ ID NO: 3844 - protein, 18 aa, synthetic construct
KTIHGNGSPHSKAQNQET

SEQ ID NO: 3845 - protein, 18 aa, synthetic construct
KAINGNGSPHKRGQNQQT

SEQ ID NO: 3846 - protein, 18 aa, synthetic construct
KTINGNGSPHSKAPNLQT

SEQ ID NO: 3847 - protein, 18 aa, synthetic construct
KTIKGGGSPHSKAQDQQT

SEQ ID NO: 3848 - protein, 18 aa, synthetic construct
KTINGHPSPHWKGQNQQT

SEQ ID NO: 3849 - protein, 18 aa, synthetic construct
KTINGSGSPHIVWQNQQT

SEQ ID NO: 3850 - protein, 18 aa, synthetic construct
KTINGSGSPHSKYFMQQT

SEQ ID NO: 3851 - protein, 18 aa, synthetic construct
KTINGSGSPHSKARQRQT

SEQ ID NO: 3852 - protein, 18 aa, synthetic construct
KTINGSGSPHSCHQNQQT

SEQ ID NO: 3853 - protein, 18 aa, synthetic construct
KTINGSGSPHFPWQNQQT

SEQ ID NO: 3854 - protein, 18 aa, synthetic construct
KTINGSGSPHSKIRRQQT

SEQ ID NO: 3855 - protein, 18 aa, synthetic construct
KTINGSGSPHVYYQNQQT

SEQ ID NO: 3856 - protein, 18 aa, synthetic construct
KTINGSGSPHSLYWNQQT

SEQ ID NO: 3857 - protein, 18 aa, synthetic construct
KTINGSGSPHSKPKRQQT

SEQ ID NO: 3858 - protein, 18 aa, synthetic construct
KPRWGSGSPHSKAQNQQT

SEQ ID NO: 3859 - protein, 18 aa, synthetic construct
KTINGSGSPHSKAFSWQT

SEQ ID NO: 3860 - protein, 18 aa, synthetic construct
KTINGSGSPHSRFWNQQT

SEQ ID NO: 3861 - protein, 18 aa, synthetic construct
KTINGSGSPHSKAQCLKT

SEQ ID NO: 3862 - protein, 18 aa, synthetic construct
KTINGSGSPHSRMRNQQT

SEQ ID NO: 3863 - protein, 18 aa, synthetic construct
KTINGSGSPHSVKKNQQT

SEQ ID NO: 3864 - protein, 18 aa, synthetic construct
KTINGSGSPHSWAPNQQT

SEQ ID NO: 3865 - protein, 18 aa, synthetic construct
KTINGSGSPHSLWKNQQT

SEQ ID NO: 3866 - protein, 18 aa, synthetic construct
KTINGSGSPHSKARWQQT

SEQ ID NO: 3867 - protein, 18 aa, synthetic construct
KTINGSGSPHSFRPNQQT

SEQ ID NO: 3868 - protein, 18 aa, synthetic construct
KTINGSGSPHSKKVFQQT

SEQ ID NO: 3869 - protein, 18 aa, synthetic construct
KTINGSGSPHSYAFNQQT

SEQ ID NO: 3870 - protein, 18 aa, synthetic construct
KTINGSGSPHSKACSRQT

SEQ ID NO: 3871 - protein, 18 aa, synthetic construct
KYSAGSGSPHSKAQNQQT

SEQ ID NO: 3872 - protein, 18 aa, synthetic construct
KTINGSGSPHSKRLWQQT

SEQ ID NO: 3873 - protein, 18 aa, synthetic construct
KTINGSGSPHSCSRNQQT

SEQ ID NO: 3874 - protein, 18 aa, synthetic construct
KTINGSGSPHSRCPNQQT

SEQ ID NO: 3875 - protein, 18 aa, synthetic construct
KTINGSGSPHSGACNQQT

SEQ ID NO: 3876 - protein, 18 aa, synthetic construct
KYYTGSGSPHSKAQNQQT

SEQ ID NO: 3877 - protein, 18 aa, synthetic construct
KTINGSGSPHSKFRQQQT

SEQ ID NO: 3878 - protein, 18 aa, synthetic construct
KTINGSGSPHSFPFNQQT

SEQ ID NO: 3879 - protein, 18 aa, synthetic construct
KTINGSGSPHSFFGNQQT

SEQ ID NO: 3880 - protein, 18 aa, synthetic construct
KTINGSGSPHSMCQNQQT

SEQ ID NO: 3881 - protein, 18 aa, synthetic construct
KTINGSGSPHSKLFWQQT

SEQ ID NO: 3882 - protein, 18 aa, synthetic construct
KTINGSGSPHSKTRKQQT

SEQ ID NO: 3883 - protein, 18 aa, synthetic construct
KTINGSGSPHSGKRNQQT

SEQ ID NO: 3884 - protein, 18 aa, synthetic construct
KTINGSGSPHSKAQNFKR

SEQ ID NO: 3885 - protein, 18 aa, synthetic construct
KTINGSGSPHFYRQNQQT

SEQ ID NO: 3886 - protein, 18 aa, synthetic construct
KTINGSGSPHCRVQNQQT

SEQ ID NO: 3887 - protein, 18 aa, synthetic construct
KTINGSGSPHYGIQNQQT

SEQ ID NO: 3888 - protein, 18 aa, synthetic construct
KTINGSGSPHSKAQRFKT

SEQ ID NO: 3889 - protein, 18 aa, synthetic construct
KTINGSGSPHVNCQNQQT

SEQ ID NO: 3890 - protein, 18 aa, synthetic construct
KTINGSGSPHSKPFRQQT

SEQ ID NO: 3891 - protein, 18 aa, synthetic construct
KTINGSGSPHSLAWNQQT

SEQ ID NO: 3892 - protein, 18 aa, synthetic construct
KTINGSGSPHSKRSYQQT

SEQ ID NO: 3893 - protein, 18 aa, synthetic construct
KTINGSGSPHWSYQNQQT

SEQ ID NO: 3894 - protein, 18 aa, synthetic construct
KTINGSGSPHRWLQNQQT

SEQ ID NO: 3895 - protein, 18 aa, synthetic construct
KTINGSGSPHPSCQNQQT

SEQ ID NO: 3896 - protein, 18 aa, synthetic construct
KTINGSGSPHSSWLNQQT

SEQ ID NO: 3897 - protein, 18 aa, synthetic construct
KPRFGSGSPHSKAQNQQT

SEQ ID NO: 3898 - protein, 18 aa, synthetic construct
KWLTGSGSPHSKAQNQQT

SEQ ID NO: 3899 - protein, 18 aa, synthetic construct
KTINGSGSPHSKRRAQQT

SEQ ID NO: 3900 - protein, 18 aa, synthetic construct
KTINGSGSPHSKAQTCRT

SEQ ID NO: 3901 - protein, 18 aa, synthetic construct
KTINGSGSPHSKGCTQQT

SEQ ID NO: 3902 - protein, 18 aa, synthetic construct
KTINGSGSPHVPWQNQQT

SEQ ID NO: 3903 - protein, 18 aa, synthetic construct
KTINGSGSPHSKRYTQQT

SEQ ID NO: 3904 - protein, 18 aa, synthetic construct
KTINGSGSPHSGCQNQQT

SEQ ID NO: 3905 - protein, 18 aa, synthetic construct
KTINGSGSPHSFTPNQQT

SEQ ID NO: 3906 - protein, 18 aa, synthetic construct
KTINGSGSPHSTTCNQQT

SEQ ID NO: 3907 - protein, 18 aa, synthetic construct
KTINGSGSPHSKARMYQT

SEQ ID NO: 3908 - protein, 18 aa, synthetic construct
KTINGSGSPHPKRQNQQT

SEQ ID NO: 3909 - protein, 18 aa, synthetic construct
KTINGSGSPHSKCFLQQT

SEQ ID NO: 3910 - protein, 18 aa, synthetic construct
KTINGSGSPHWVPQNQQT

SEQ ID NO: 3911 - protein, 18 aa, synthetic construct
KTINGSGSPHSFWSNQQT

SEQ ID NO: 3912 - protein, 18 aa, synthetic construct
KRSYGSGSPHSKAQNQQT

SEQ ID NO: 3913 - protein, 18 aa, synthetic construct
KYVFGSGSPHSKAQNQQT

SEQ ID NO: 3914 - protein, 18 aa, synthetic construct
KTINGSGSPHSKFKNQQT

SEQ ID NO: 3915 - protein, 18 aa, synthetic construct
KTINGSGSPHRIKQNQQT

SEQ ID NO: 3916 - protein, 18 aa, synthetic construct
KTINGSGSPHSKAPRRQT

SEQ ID NO: 3917 - protein, 18 aa, synthetic construct
KTINGSGSPHSFRYNQQT

SEQ ID NO: 3918 - protein, 18 aa, synthetic construct
KTINGSGSPHSKMICQQT

SEQ ID NO: 3919 - protein, 18 aa, synthetic construct
KTINGSGSPHLRWQNQQT

SEQ ID NO: 3920 - protein, 18 aa, synthetic construct
KTINGSGSPHLPTQNQQT

SEQ ID NO: 3921 - protein, 18 aa, synthetic construct
KTINGSGSPHSKWKSQQT

SEQ ID NO: 3922 - protein, 18 aa, synthetic construct
KTINGSGSPHSYMRNQQT

SEQ ID NO: 3923 - protein, 18 aa, synthetic construct
KTINGSGSPHSKAARRQT

SEQ ID NO: 3924 - protein, 18 aa, synthetic construct
KTINGSGSPHLLCQNQQT

SEQ ID NO: 3925 - protein, 18 aa, synthetic construct
KTINGSGSPHRCCQNQQT

SEQ ID NO: 3926 - protein, 18 aa, synthetic construct
KTINGSGSPHLCVQNQQT

SEQ ID NO: 3927 - protein, 18 aa, synthetic construct
KTINGSGSPHSKLTRQQT

SEQ ID NO: 3928 - protein, 18 aa, synthetic construct
KTINGSGSPHSKLCTQQT

SEQ ID NO: 3929 - protein, 18 aa, synthetic construct
KKHLGSGSPHSKAQNQQT

SEQ ID NO: 3930 - protein, 18 aa, synthetic construct
KTINGSGSPHSKIRGQQT

SEQ ID NO: 3931 - protein, 18 aa, synthetic construct
KTINGSGSPHSYLVNQQT

SEQ ID NO: 3932 - protein, 18 aa, synthetic construct
KTINGSGSPHQGCQNQQT

SEQ ID NO: 3933 - protein, 18 aa, synthetic construct
KTINGSGSPHMAFQNQQT

SEQ ID NO: 3934 - protein, 18 aa, synthetic construct
KTINGSGSPHSKACQFQT

SEQ ID NO: 3935 - protein, 18 aa, synthetic construct
KTINGSGSPHSKWGLQQT

SEQ ID NO: 3936 - protein, 18 aa, synthetic construct
KTINGSGSPHSKILRQQT

SEQ ID NO: 3937 - protein, 18 aa, synthetic construct
KTINGSGSPHSFQINQQT

SEQ ID NO: 3938 - protein, 18 aa, synthetic construct
KTINGSGSPHSKACISQT

SEQ ID NO: 3939 - protein, 18 aa, synthetic construct
KTINGSGSPHSKAQTHRT

SEQ ID NO: 3940 - protein, 18 aa, synthetic construct
KTINGSGSPHSKALRCQT

SEQ ID NO: 3941 - protein, 18 aa, synthetic construct
KTINGSGSPHSKAFYIQT

SEQ ID NO: 3942 - protein, 18 aa, synthetic construct
KTINGSGSPHSKAHARQT

SEQ ID NO: 3943 - protein, 18 aa, synthetic construct
KTINGSGSPHSLCLNQQT

SEQ ID NO: 3944 - protein, 18 aa, synthetic construct
KTINGSGSPHSKAFVRQT

SEQ ID NO: 3945 - protein, 18 aa, synthetic construct
KPPLGSGSPHSKAQNQQT

SEQ ID NO: 3946 - protein, 18 aa, synthetic construct
KTINGSGSPHRPWQNQQT

SEQ ID NO: 3947 - protein, 18 aa, synthetic construct
KPARGSGSPHSKAQNQQT

SEQ ID NO: 3948 - protein, 18 aa, synthetic construct
KTINGSGSPHRPRQNQQT

SEQ ID NO: 3949 - protein, 18 aa, synthetic construct
KTINGSGSPHSCPQNQQT

SEQ ID NO: 3950 - protein, 18 aa, synthetic construct
KTINGSGSPHSKAQFILT

SEQ ID NO: 3951 - protein, 18 aa, synthetic construct
KTINGSGSPHSVRYNQQT

SEQ ID NO: 3952 - protein, 18 aa, synthetic construct
KSRRGSGSPHSKAQNQQT

SEQ ID NO: 3953 - protein, 18 aa, synthetic construct
KTINGSGSPHSVRCNQQT

SEQ ID NO: 3954 - protein, 18 aa, synthetic construct
KFFHGSGSPHSKAQNQQT

SEQ ID NO: 3955 - protein, 18 aa, synthetic construct
KTINGSGSPHSKMPCQQT

SEQ ID NO: 3956 - protein, 18 aa, synthetic construct
KTINGSGSPHSKKTSQQT

SEQ ID NO: 3957 - protein, 18 aa, synthetic construct
KRYNGSGSPHSKAQNQQT

SEQ ID NO: 3958 - protein, 18 aa, synthetic construct
KTINGSGSPHSLPYNQQT

SEQ ID NO: 3959 - protein, 18 aa, synthetic construct
KTINGSGSPHVYHQNQQT

SEQ ID NO: 3960 - protein, 18 aa, synthetic construct
KTINGSGSPHSKAQSRKT

SEQ ID NO: 3961 - protein, 18 aa, synthetic construct
KTINGSGSPHSYTRNQQT

SEQ ID NO: 3962 - protein, 18 aa, synthetic construct
KTINGSGSPHLVYQNQQT

SEQ ID NO: 3963 - protein, 18 aa, synthetic construct
KTINGSGSPHSKALRWQT

SEQ ID NO: 3964 - protein, 18 aa, synthetic construct
KTINGSGSPHYRYQNQQT

SEQ ID NO: 3965 - protein, 18 aa, synthetic construct
KTINGSGSPHSWLKNQQT

SEQ ID NO: 3966 - protein, 18 aa, synthetic construct
KTINGSGSPHSKAQMQIT

SEQ ID NO: 3967 - protein, 18 aa, synthetic construct
KTINGSGSPHCPAQNQQT

SEQ ID NO: 3968 - protein, 18 aa, synthetic construct
KTINGSGSPHSMCTNQQT

SEQ ID NO: 3969 - protein, 18 aa, synthetic construct
KTINGSGSPHSPPDNQQT

SEQ ID NO: 3970 - protein, 18 aa, synthetic construct
KTINGSGSPHSKRNYQQT

SEQ ID NO: 3971 - protein, 18 aa, synthetic construct
KTINGSGSPHRWTQNQQT

SEQ ID NO: 3972 - protein, 18 aa, synthetic construct
KTINGSGSPHSKACRLQT

SEQ ID NO: 3973 - protein, 18 aa, synthetic construct
KTINGSGSPHPRKQNQQT

SEQ ID NO: 3974 - protein, 18 aa, synthetic construct
KTINGSGSPHSKCSVQQT

SEQ ID NO: 3975 - protein, 18 aa, synthetic construct
KTINGSGSPHSKAQYVRT

SEQ ID NO: 3976 - protein, 18 aa, synthetic construct
KTINGSGSPHSKARISQT

SEQ ID NO: 3977 - protein, 18 aa, synthetic construct
KTINGSGSPHPFVQNQQT

SEQ ID NO: 3978 - protein, 18 aa, synthetic construct
KTINGSGSPHSKLPKQQT

SEQ ID NO: 3979 - protein, 18 aa, synthetic construct
KTINGSGSPHSKSEQQQT

SEQ ID NO: 3980 - protein, 18 aa, synthetic construct
KTINGSGSPHWVAQNQQT

SEQ ID NO: 3981 - protein, 18 aa, synthetic construct
KTINGSGSPHSLYQNQQT

SEQ ID NO: 3982 - protein, 18 aa, synthetic construct
KTINGSGSPHSKVRMQQT

SEQ ID NO: 3983 - protein, 18 aa, synthetic construct
KTINYTRSPHSKAQNQQT

SEQ ID NO: 3984 - protein, 18 aa, synthetic construct
KTINGSGSPHSSCTNQQT

SEQ ID NO: 3985 - protein, 18 aa, synthetic construct
KTINGSGSPHSKNSRQQT

SEQ ID NO: 3986 - protein, 18 aa, synthetic construct
KTINGSGSPHSKRKRQQT

SEQ ID NO: 3987 - protein, 18 aa, synthetic construct
KTINGSGSPHLCTQNQQT

SEQ ID NO: 3988 - protein, 18 aa, synthetic construct
KTINGSGSPHSKAQSAKT

SEQ ID NO: 3989 - protein, 18 aa, synthetic construct
KTINGSGSPHSTCLNQQT

SEQ ID NO: 3990 - protein, 18 aa, synthetic construct
KTINGSGSPHSYARNQQT

SEQ ID NO: 3991 - protein, 18 aa, synthetic construct
KTINGSGSPHSKQRPQQT

SEQ ID NO: 3992 - protein, 18 aa, synthetic construct
KTINGSGSPHSKRVVQQT

SEQ ID NO: 3993 - protein, 18 aa, synthetic construct
KRFSGSGSPHSKAQNQQT

SEQ ID NO: 3994 - protein, 18 aa, synthetic construct
KTINGSGSPHKSGQNPQT

SEQ ID NO: 3995 - protein, 18 aa, synthetic construct
KTINGSGSPHSKALRHQT

SEQ ID NO: 3996 - protein, 18 aa, synthetic construct
KTINGSGSPHSYYSNQQT

SEQ ID NO: 3997 - protein, 18 aa, synthetic construct
KTINGSGSPHSLTCNQQT

SEQ ID NO: 3998 - protein, 18 aa, synthetic construct
KTINGSGSPHSCQSNQQT

SEQ ID NO: 3999 - protein, 18 aa, synthetic construct
KTINGSGSPHSKAQSIKT

SEQ ID NO: 4000 - protein, 18 aa, synthetic construct
KYSMGSGSPHSKAQNQQT

SEQ ID NO: 4001 - protein, 18 aa, synthetic construct
KTINGSGSPHSKAKGWQT

SEQ ID NO: 4002 - protein, 18 aa, synthetic construct
KTIVGSGSPHSKPQNQQT

SEQ ID NO: 4003 - protein, 18 aa, synthetic construct
KTINGSGSPHFPFQNQQT

SEQ ID NO: 4004 - protein, 18 aa, synthetic construct
KPFLGSGSPHSKAQNQQT

SEQ ID NO: 4005 - protein, 18 aa, synthetic construct
KTINGSGSPHSKCTSQQT

SEQ ID NO: 4006 - protein, 18 aa, synthetic construct
KTINGSGSPHSVFENQQT

SEQ ID NO: 4007 - protein, 18 aa, synthetic construct
KTINGSGSPHSKAKKVQT

SEQ ID NO: 4008 - protein, 18 aa, synthetic construct
KTINGSGSPHSKAQRCST

SEQ ID NO: 4009 - protein, 18 aa, synthetic construct
KTINGSGSPHSKAQFCLT

SEQ ID NO: 4010 - protein, 18 aa, synthetic construct
KTINGSGSPHGRYQNQQT

SEQ ID NO: 4011 - protein, 18 aa, synthetic construct
KTQRKSGSPHSKAQNQQT

SEQ ID NO: 4012 - protein, 18 aa, synthetic construct
KTINGSYSPHCLAQNQQT

SEQ ID NO: 4013 - protein, 18 aa, synthetic construct
KTINGSLSPHFWAQNQQT

SEQ ID NO: 4014 - protein, 18 aa, synthetic construct
KTINHRISPHSKAQNQQT

SEQ ID NO: 4015 - protein, 18 aa, synthetic construct
KTRRPSGSPHSKAQNQQT

SEQ ID NO: 4016 - protein, 18 aa, synthetic construct
KTINGAYSPHRKAQNQQT

SEQ ID NO: 4017 - protein, 18 aa, synthetic construct
KTINGRRSPHGKAQNQQT

SEQ ID NO: 4018 - protein, 18 aa, synthetic construct
KTINGRTSPHRKAQNQQT

SEQ ID NO: 4019 - protein, 18 aa, synthetic construct
KTINGSRSPHAWAQNQQT

SEQ ID NO: 4020 - protein, 18 aa, synthetic construct
KTINKCLSPHSKAQNQQT

SEQ ID NO: 4021 - protein, 18 aa, synthetic construct
KTINGSSSPHRCAQNQQT

SEQ ID NO: 4022 - protein, 18 aa, synthetic construct
KTINCRTSPHSKAQNQQT

SEQ ID NO: 4023 - protein, 18 aa, synthetic construct
KTIFDCGSPHSKAQNQQT

SEQ ID NO: 4024 - protein, 18 aa, synthetic construct
KTINSPRSPHSKAQNQQT

SEQ ID NO: 4025 - protein, 18 aa, synthetic construct
KTINGLDSPHRSRQNQQT

SEQ ID NO: 4026 - protein, 18 aa, synthetic construct
KTRTRSGSPHSKAQNQQT

SEQ ID NO: 4027 - protein, 18 aa, synthetic construct
KTINGSISPHCPAQNQQT

SEQ ID NO: 4028 - protein, 18 aa, synthetic construct
KTINGLVSPHRKAQNQQT

SEQ ID NO: 4029 - protein, 18 aa, synthetic construct
KTINALRSPHSKAQNQQT

SEQ ID NO: 4030 - protein, 18 aa, synthetic construct
KTICGRGSPHSKAQNQQT

SEQ ID NO: 4031 - protein, 18 aa, synthetic construct
KTTRKSGSPHSKAQNQQT

SEQ ID NO: 4032 - protein, 18 aa, synthetic construct
KTMQRSGSPHSKAQNQQT

SEQ ID NO: 4033 - protein, 18 aa, synthetic construct
KTINGSSSPHWMAQNQQT

SEQ ID NO: 4034 - protein, 18 aa, synthetic construct
KTRKRSGSPHSKAQNQQT

SEQ ID NO: 4035 - protein, 18 aa, synthetic construct
KTINFTRSPHSKAQNQQT

SEQ ID NO: 4036 - protein, 18 aa, synthetic construct
KTINNLRSPHSKAQNQQT

SEQ ID NO: 4037 - protein, 18 aa, synthetic construct
KTINGRPSPHGKAQNQQT

SEQ ID NO: 4038 - protein, 18 aa, synthetic construct
KTINWSRSPHSKAQNQQT

SEQ ID NO: 4039 - protein, 18 aa, synthetic construct
KTINGTRSPHKKAQNQQT

SEQ ID NO: 4040 - protein, 18 aa, synthetic construct
KTINGSVSPHCTAQNQQT

SEQ ID NO: 4041 - protein, 18 aa, synthetic construct
KTTRCSGSPHSKAQNQQT

SEQ ID NO: 4042 - protein, 18 aa, synthetic construct
KTKLCSGSPHSKAQNQQT

SEQ ID NO: 4043 - protein, 18 aa, synthetic construct
KTINLGCSPHSKAQNQQT

SEQ ID NO: 4044 - protein, 18 aa, synthetic construct
KTISGHDSPHISGQYQQT

SEQ ID NO: 4045 - protein, 18 aa, synthetic construct
KTINGRRSPHMKAQNQQT

SEQ ID NO: 4046 - protein, 18 aa, synthetic construct
KTINGPWSPHRKAQNQQT

SEQ ID NO: 4047 - protein, 18 aa, synthetic construct
KTINSCFSPHSKAQNQQT

SEQ ID NO: 4048 - protein, 18 aa, synthetic construct
KTIKRYGSPHSKAQNQQT

SEQ ID NO: 4049 - protein, 18 aa, synthetic construct
KTINRYSSPHSKAQNQQT

SEQ ID NO: 4050 - protein, 18 aa, synthetic construct
KTTGRSGSPHSKAQNQQT

SEQ ID NO: 4051 - protein, 18 aa, synthetic construct
KTINRQFSPHSKAQNQQT

SEQ ID NO: 4052 - protein, 18 aa, synthetic construct
KTITGHDSPHSKAQNQQT

SEQ ID NO: 4053 - protein, 18 aa, synthetic construct
KTINGSGSPHKSGQYQQT

SEQ ID NO: 4054 - protein, 18 aa, synthetic construct
KTINGSGSPHKSGQDQQT

SEQ ID NO: 4055 - protein, 18 aa, synthetic construct
KTINGSGSPHKSGQIQQT

SEQ ID NO: 4056 - protein, 18 aa, synthetic construct
KTINGSGSPHKSGRNQQT

SEQ ID NO: 4057 - protein, 18 aa, synthetic construct
KTINGSGSPHKSGKNQQT

SEQ ID NO: 4058 - protein, 18 aa, synthetic construct
KTIYGHDSPHSKAQNQQT

SEQ ID NO: 4059 - protein, 18 aa, synthetic construct
KTINGSGSPHKSGQNQQS

SEQ ID NO: 4060 - protein, 18 aa, synthetic construct
KTINGSGSPHKSGQNLQT

SEQ ID NO: 4061 - protein, 18 aa, synthetic construct
KAINGHDSPHSKAQNQQT

SEQ ID NO: 4062 - protein, 18 aa, synthetic construct
KTVNGHDSPHSKAQNQQT

SEQ ID NO: 4063 - protein, 18 aa, synthetic construct
KTIKGHDSPHSKAQNQQT

SEQ ID NO: 4064 - protein, 18 aa, synthetic construct
KSINGHDSPHSKAQNQQT

SEQ ID NO: 4065 - protein, 18 aa, synthetic construct
KTINGSGSPHKSGQTQQT

SEQ ID NO: 4066 - protein, 18 aa, synthetic construct
KTINGSGSPHKSGHNQQT

SEQ ID NO: 4067 - protein, 18 aa, synthetic construct
KTFNGHDSPHSKAQNQQT

SEQ ID NO: 4068 - protein, 18 aa, synthetic construct
KTINGSGSPHKSGLNQQT

SEQ ID NO: 4069 - protein, 18 aa, synthetic construct
KTINGHDSPHSKALNQQT

SEQ ID NO: 4070 - protein, 18 aa, synthetic construct
KTINGSGSPHKSGQNQLT

SEQ ID NO: 4071 - protein, 18 aa, synthetic construct
KTLNGHDSPHSKAQNQQT

SEQ ID NO: 4072 - protein, 18 aa, synthetic construct
KTINGSGSPHKSGQNQHT

SEQ ID NO: 4073 - protein, 18 aa, synthetic construct
KTIDGHDSPHSKAQNQQT

SEQ ID NO: 4074 - protein, 18 aa, synthetic construct
KTNNGHDSPHSKAQNQQT

SEQ ID NO: 4075 - protein, 18 aa, synthetic construct
KTINGSGSPHKSGQKQQT

SEQ ID NO: 4076 - protein, 18 aa, synthetic construct
KTINGSGSPHKSGQNRQT

SEQ ID NO: 4077 - protein, 18 aa, synthetic construct
KTINGSGSPHKSGQNQQN

SEQ ID NO: 4078 - protein, 18 aa, synthetic construct
KTINGSGSPHKSGQNQQA

SEQ ID NO: 4079 - protein, 18 aa, synthetic construct
KTINGHDSPHSKAHNQQT

SEQ ID NO: 4080 - protein, 18 aa, synthetic construct
KTINGHDSPHSKAQNQQT

SEQ ID NO: 4081 - protein, 18 aa, synthetic construct
KTINGSGSPHKSGQNQQP

SEQ ID NO: 4082 - protein, 18 aa, synthetic construct
KTINGHDSPHCKAQNQQT

SEQ ID NO: 4083 - protein, 18 aa, synthetic construct
KTINGHDSPHSKAQNQQS

SEQ ID NO: 4084 - protein, 18 aa, synthetic construct
KTINGSGSPHKSGQNQQT

SEQ ID NO: 4085 - protein, 18 aa, synthetic construct
KTINGHDSPDKSGQNQQT

SEQ ID NO: 4086 - protein, 18 aa, synthetic construct
KPINGHDSPHKSGQNHQS

SEQ ID NO: 4087 - protein, 18 aa, synthetic construct
KTSNGSGSPHKSGQNQQT

SEQ ID NO: 4088 - protein, 18 aa, synthetic construct
KTVNGSGSPHKSGQNQQT

SEQ ID NO: 4089 - protein, 18 aa, synthetic construct
KTINGHDSTHKSGHNQQT

SEQ ID NO: 4090 - protein, 18 aa, synthetic construct
KTINGHDSPHSKAQNQQN

SEQ ID NO: 4091 - protein, 18 aa, synthetic construct
KTIYGSGSPHKSGQNQQT

SEQ ID NO: 4092 - protein, 18 aa, synthetic construct
KTINGLDSQHKSGQNQQT

SEQ ID NO: 4093-4094 - skipped (2 entries)

SEQ ID NO: 4095 - protein, 18 aa, synthetic construct
KTIIGHDSPHSKAQNQQT

SEQ ID NO: 4096 - protein, 18 aa, synthetic construct
KTSNGHDSPHSKAQNQQT

SEQ ID NO: 4097 - protein, 18 aa, synthetic construct
KTINGSGSPHSKAQNRRR

SEQ ID NO: 4098 - protein, 18 aa, synthetic construct
KTISKRGSPHSKAQNQQT

SEQ ID NO: 4099 - protein, 18 aa, synthetic construct
KGLGGSGSPHSKAQNQQT

SEQ ID NO: 4100 - protein, 18 aa, synthetic construct
KTINGHDSPHSKAQNLQT

SEQ ID NO: 4101 - protein, 18 aa, synthetic construct
KTINGHDSPHSKAQNQQI

SEQ ID NO: 4102 - protein, 18 aa, synthetic construct
KTINGSGSPHFTRQNQQT

SEQ ID NO: 4103 - protein, 18 aa, synthetic construct
KTINGSGSPHSLPWNQQT

SEQ ID NO: 4104 - protein, 18 aa, synthetic construct
KTINGHDSPHSKAQNHQT

SEQ ID NO: 4105 - protein, 18 aa, synthetic construct
KTMNGHDSPHSKAQNQQT

SEQ ID NO: 4106 - protein, 18 aa, synthetic construct
KPYKGSGSPHSKAQNQQT

SEQ ID NO: 4107 - protein, 18 aa, synthetic construct
KRLWGSGSPHSKAQNQQT

SEQ ID NO: 4108 - protein, 18 aa, synthetic construct
KRMRGSGSPHSKAQNQQT

SEQ ID NO: 4109 - protein, 18 aa, synthetic construct
KRTYGSGSPHSKAQNQQT

SEQ ID NO: 4110 - protein, 18 aa, synthetic construct
KTINCLRSPHSKAQNQQT

SEQ ID NO: 4111 - protein, 18 aa, synthetic construct
KTINFSRSPHSKAQNQQT

SEQ ID NO: 4112 - protein, 18 aa, synthetic construct
KTINGLRSPHFKAQNQQT

SEQ ID NO: 4113 - protein, 18 aa, synthetic construct
KTINGNRSPHNKAQNQQT

SEQ ID NO: 4114 - protein, 18 aa, synthetic construct
KTINGPRSPHYKAQNQQT

SEQ ID NO: 4115 - protein, 18 aa, synthetic construct
KTINGQASPHWKAQNQQT

SEQ ID NO: 4116 - protein, 18 aa, synthetic construct
KTINGRCSPHSKAQNQQT

SEQ ID NO: 4117 - protein, 18 aa, synthetic construct
KTINGRHSPHSKAQNQQT

SEQ ID NO: 4118 - protein, 18 aa, synthetic construct
KTINGRKSPHRKAQNQQT

SEQ ID NO: 4119 - protein, 18 aa, synthetic construct
KTINGRLSPHWKAQNQQT

SEQ ID NO: 4120 - protein, 18 aa, synthetic construct
KTINGRLSPHYKAQNQQT

SEQ ID NO: 4121 - protein, 18 aa, synthetic construct
KTINGRPSPHMKAQNQQT

SEQ ID NO: 4122 - protein, 18 aa, synthetic construct
KTINGRSSPHWKAQNQQT

SEQ ID NO: 4123 - protein, 18 aa, synthetic construct
KTINGRWSPHSKAQNQQT

SEQ ID NO: 4124 - protein, 18 aa, synthetic construct
KTINGSGSPHAPCQNQQT

SEQ ID NO: 4125 - protein, 18 aa, synthetic construct
KTINGSGSPHAWAQNQQT

SEQ ID NO: 4126 - protein, 18 aa, synthetic construct
KTINGSGSPHCMRQNQQT

SEQ ID NO: 4127 - protein, 18 aa, synthetic construct
KTINGSGSPHFCSQNQQT

SEQ ID NO: 4128 - protein, 18 aa, synthetic construct
KTINGSGSPHFLFQNQQT

SEQ ID NO: 4129 - protein, 18 aa, synthetic construct
KTINGSGSPHFWAQNQQT

SEQ ID NO: 4130 - protein, 18 aa, synthetic construct
KTINGSGSPHLCAQNQQT

SEQ ID NO: 4131 - protein, 18 aa, synthetic construct
KTINGSGSPHLRYQNQQT

SEQ ID NO: 4132 - protein, 18 aa, synthetic construct
KTINGSGSPHLYYQNQQT

SEQ ID NO: 4133 - protein, 18 aa, synthetic construct
KTINGSGSPHPLCQNQQT

SEQ ID NO: 4134 - protein, 18 aa, synthetic construct
KTINGSGSPHRIRQNQQT

SEQ ID NO: 4135 - protein, 18 aa, synthetic construct
KTINGSGSPHRLFQNQQT

SEQ ID NO: 4136 - protein, 18 aa, synthetic construct
KTINGSGSPHSCGQNQQT

SEQ ID NO: 4137 - protein, 18 aa, synthetic construct
KTINGSGSPHSCLRNQQT

SEQ ID NO: 4138 - protein, 18 aa, synthetic construct
KTINGSGSPHSCLSNQQT

SEQ ID NO: 4139 - protein, 18 aa, synthetic construct
KTINGSGSPHSCRLNQQT

SEQ ID NO: 4140 - protein, 18 aa, synthetic construct
KTINGSGSPHSCSLNQQT

SEQ ID NO: 4141 - protein, 18 aa, synthetic construct
KTINGSGSPHSKACTLQT

SEQ ID NO: 4142 - protein, 18 aa, synthetic construct
KTINGSGSPHSKAFRAQT

SEQ ID NO: 4143 - protein, 18 aa, synthetic construct
KTINGSGSPHSKAIRKQT

SEQ ID NO: 4144 - protein, 18 aa, synthetic construct
KTINGSGSPHSKAQASRT

SEQ ID NO: 4145 - protein, 18 aa, synthetic construct
KTINGSGSPHSKAQFELT

SEQ ID NO: 4146 - protein, 18 aa, synthetic construct
KTINGSGSPHSKAQIVIT

SEQ ID NO: 4147 - protein, 18 aa, synthetic construct
KTINGSGSPHSKAQLART

SEQ ID NO: 4148 - protein, 18 aa, synthetic construct
KTINGSGSPHSKAQLQRT

SEQ ID NO: 4149 - protein, 18 aa, synthetic construct
KTINGSGSPHSKAQNARR

SEQ ID NO: 4150 - protein, 18 aa, synthetic construct
KTINGSGSPHSKAQNCPR

SEQ ID NO: 4151 - protein, 18 aa, synthetic construct
KTINGSGSPHSKAQNMRR

SEQ ID NO: 4152 - protein, 18 aa, synthetic construct
KTINGSGSPHSKAQNRRV

SEQ ID NO: 4153 - protein, 18 aa, synthetic construct
KTINGSGSPHSKAQPSRT

SEQ ID NO: 4154 - protein, 18 aa, synthetic construct
KTINGSGSPHSKAQQVKT

SEQ ID NO: 4155 - protein, 18 aa, synthetic construct
KTINGSGSPHSKAQQVRT

SEQ ID NO: 4156 - protein, 18 aa, synthetic construct
KTINGSGSPHSKAQRLKT

SEQ ID NO: 4157 - protein, 18 aa, synthetic construct
KTINGSGSPHSKAQRRAT

SEQ ID NO: 4158 - protein, 18 aa, synthetic construct
KTINGSGSPHSKAQRRGT

SEQ ID NO: 4159 - protein, 18 aa, synthetic construct
KTINGSGSPHSKAQRRRT

SEQ ID NO: 4160 - protein, 18 aa, synthetic construct
KTINGSGSPHSKAQRTRT

SEQ ID NO: 4161 - protein, 18 aa, synthetic construct
KTINGSGSPHSKAQRVHT

SEQ ID NO: 4162 - protein, 18 aa, synthetic construct
KTINGSGSPHSKAQTYRT

SEQ ID NO: 4163 - protein, 18 aa, synthetic construct
KTINGSGSPHSKAQVRKT

SEQ ID NO: 4164 - protein, 18 aa, synthetic construct
KTINGSGSPHSKARGRQT

SEQ ID NO: 4165 - protein, 18 aa, synthetic construct
KTINGSGSPHSKARLCQT

SEQ ID NO: 4166 - protein, 18 aa, synthetic construct
KTINGSGSPHSKARLKQT

SEQ ID NO: 4167 - protein, 18 aa, synthetic construct
KTINGSGSPHSKARNSQT

SEQ ID NO: 4168 - protein, 18 aa, synthetic construct
KTINGSGSPHSKARWVQT

SEQ ID NO: 4169 - protein, 18 aa, synthetic construct
KTINGSGSPHSKAVRWQT

SEQ ID NO: 4170 - protein, 18 aa, synthetic construct
KTINGSGSPHSKAYTRQT

SEQ ID NO: 4171 - protein, 18 aa, synthetic construct
KTINGSGSPHSKCQSQQT

SEQ ID NO: 4172 - protein, 18 aa, synthetic construct
KTINGSGSPHSKFLRQQT

SEQ ID NO: 4173 - protein, 18 aa, synthetic construct
KTINGSGSPHSKFRFQQT

SEQ ID NO: 4174 - protein, 18 aa, synthetic construct
KTINGSGSPHSKFRLQQT

SEQ ID NO: 4175 - protein, 18 aa, synthetic construct
KTINGSGSPHSKFRRQQT

SEQ ID NO: 4176 - protein, 18 aa, synthetic construct
KTINGSGSPHSKGMKQQT

SEQ ID NO: 4177 - protein, 18 aa, synthetic construct
KTINGSGSPHSKKLRQQT

SEQ ID NO: 4178 - protein, 18 aa, synthetic construct
KTINGSGSPHSKKRPQQT

SEQ ID NO: 4179 - protein, 18 aa, synthetic construct
KTINGSGSPHSKKSRQQT

SEQ ID NO: 4180 - protein, 18 aa, synthetic construct
KTINGSGSPHSKLYRQQT

SEQ ID NO: 4181 - protein, 18 aa, synthetic construct
KTINGSGSPHSKLYWQQT

SEQ ID NO: 4182 - protein, 18 aa, synthetic construct
KTINGSGSPHSKPRMQQT

SEQ ID NO: 4183 - protein, 18 aa, synthetic construct
KTINGSGSPHSKRFPQQT

SEQ ID NO: 4184 - protein, 18 aa, synthetic construct
KTINGSGSPHSKRFRQQT

SEQ ID NO: 4185 - protein, 18 aa, synthetic construct
KTINGSGSPHSKRPYQQT

SEQ ID NO: 4186 - protein, 18 aa, synthetic construct
KTINGSGSPHSKRRMQQT

SEQ ID NO: 4187 - protein, 18 aa, synthetic construct
KTINGSGSPHSKRSKQQT

SEQ ID NO: 4188 - protein, 18 aa, synthetic construct
KTINGSGSPHSKRSRQQT

SEQ ID NO: 4189 - protein, 18 aa, synthetic construct
KTINGSGSPHSKRTMQQT

SEQ ID NO: 4190 - protein, 18 aa, synthetic construct
KTINGSGSPHSKRTRQQT

SEQ ID NO: 4191 - protein, 18 aa, synthetic construct
KTINGSGSPHSKRVRQQT

SEQ ID NO: 4192 - protein, 18 aa, synthetic construct
KTINGSGSPHSKRYIQQT

SEQ ID NO: 4193 - protein, 18 aa, synthetic construct
KTINGSGSPHSKRYNQQT

SEQ ID NO: 4194 - protein, 18 aa, synthetic construct
KTINGSGSPHSKRYPQQT

SEQ ID NO: 4195 - protein, 18 aa, synthetic construct
KTINGSGSPHSKRYSQQT

SEQ ID NO: 4196 - protein, 18 aa, synthetic construct
KTINGSGSPHSKTCIQQT

SEQ ID NO: 4197 - protein, 18 aa, synthetic construct
KTINGSGSPHSKWLTQQT

SEQ ID NO: 4198 - protein, 18 aa, synthetic construct
KTINGSGSPHSKWVVQQT

SEQ ID NO: 4199 - protein, 18 aa, synthetic construct
KTINGSGSPHSKYRLQQT

SEQ ID NO: 4200 - protein, 18 aa, synthetic construct
KTINGSGSPHSKYSKQQT

SEQ ID NO: 4201 - protein, 18 aa, synthetic construct
KTINGSGSPHSKYSRQQT

SEQ ID NO: 4202 - protein, 18 aa, synthetic construct
KTINGSGSPHSLKRNQQT

SEQ ID NO: 4203 - protein, 18 aa, synthetic construct
KTINGSGSPHSLWFNQQT

SEQ ID NO: 4204 - protein, 18 aa, synthetic construct
KTINGSGSPHSLWPNQQT

SEQ ID NO: 4205 - protein, 18 aa, synthetic construct
KTINGSGSPHSLWTNQQT

SEQ ID NO: 4206 - protein, 18 aa, synthetic construct
KTINGSGSPHSMRRNQQT

SEQ ID NO: 4207 - protein, 18 aa, synthetic construct
KTINGSGSPHSPCLNQQT

SEQ ID NO: 4208 - protein, 18 aa, synthetic construct
KTINGSGSPHSQWQNQQT

SEQ ID NO: 4209 - protein, 18 aa, synthetic construct
KTINGSGSPHSRCANQQT

SEQ ID NO: 4210 - protein, 18 aa, synthetic construct
KTINGSGSPHSRIRNQQT

SEQ ID NO: 4211 - protein, 18 aa, synthetic construct
KTINGSGSPHSRKSNQQT

SEQ ID NO: 4212 - protein, 18 aa, synthetic construct
KTINGSGSPHSRLWNQQT

SEQ ID NO: 4213 - protein, 18 aa, synthetic construct
KTINGSGSPHSRRFNQQT

SEQ ID NO: 4214 - protein, 18 aa, synthetic construct
KTINGSGSPHSRRPNQQT

SEQ ID NO: 4215 - protein, 18 aa, synthetic construct
KTINGSGSPHSRSCNQQT

SEQ ID NO: 4216 - protein, 18 aa, synthetic construct
KTINGSGSPHSRSKNQQT

SEQ ID NO: 4217 - protein, 18 aa, synthetic construct
KTINGSGSPHSRTKNQQT

SEQ ID NO: 4218 - protein, 18 aa, synthetic construct
KTINGSGSPHSRWLNQQT

SEQ ID NO: 4219 - protein, 18 aa, synthetic construct
KTINGSGSPHSSVCNQQT

SEQ ID NO: 4220 - protein, 18 aa, synthetic construct
KTINGSGSPHSSWRNQQT

SEQ ID NO: 4221 - protein, 18 aa, synthetic construct
KTINGSGSPHSVCQNQQT

SEQ ID NO: 4222 - protein, 18 aa, synthetic construct
KTINGSGSPHSVLCNQQT

SEQ ID NO: 4223 - protein, 18 aa, synthetic construct
KTINGSGSPHSVRRNQQT

SEQ ID NO: 4224 - protein, 18 aa, synthetic construct
KTINGSGSPHSVSCNQQT

SEQ ID NO: 4225 - protein, 18 aa, synthetic construct
KTINGSGSPHSWALNQQT

SEQ ID NO: 4226 - protein, 18 aa, synthetic construct
KTINGSGSPHSWITNQQT

SEQ ID NO: 4227 - protein, 18 aa, synthetic construct
KTINGSGSPHSWPMNQQT

SEQ ID NO: 4228 - protein, 18 aa, synthetic construct
KTINGSGSPHSWRSNQQT

SEQ ID NO: 4229 - protein, 18 aa, synthetic construct
KTINGSGSPHSYFLNQQT

SEQ ID NO: 4230 - protein, 18 aa, synthetic construct
KTINGSGSPHSYTYNQQT

SEQ ID NO: 4231 - protein, 18 aa, synthetic construct
KTINGSGSPHSYWQNQQT

SEQ ID NO: 4232 - protein, 18 aa, synthetic construct
KTINGSGSPHTLCQNQQT

SEQ ID NO: 4233 - protein, 18 aa, synthetic construct
KTINGSGSPHWLRQNQQT

SEQ ID NO: 4234 - protein, 18 aa, synthetic construct
KTINGSGSPHWPSQNQQT

SEQ ID NO: 4235 - protein, 18 aa, synthetic construct
KTINGSGSPHYLRQNQQT

SEQ ID NO: 4236 - protein, 18 aa, synthetic construct
KTINGSGSPHYTRQNQQT

SEQ ID NO: 4237 - protein, 18 aa, synthetic construct
KTINGSLSPHLWAQNQQT

SEQ ID NO: 4238 - protein, 18 aa, synthetic construct
KTINGSPSPHCQAQNQQT

SEQ ID NO: 4239 - protein, 18 aa, synthetic construct
KTINGSRSPHLCAQNQQT

SEQ ID NO: 4240 - protein, 18 aa, synthetic construct
KTINGSRSPHWRAQNQQT

SEQ ID NO: 4241 - protein, 18 aa, synthetic construct
KTINGSVSPHWLAQNQQT

SEQ ID NO: 4242 - protein, 18 aa, synthetic construct
KTINGTFSPHRKAQNQQT

SEQ ID NO: 4243 - protein, 18 aa, synthetic construct
KTINGWTSPHRKAQNQQT

SEQ ID NO: 4244 - protein, 18 aa, synthetic construct
KTINRGISPHSKAQNQQT

SEQ ID NO: 4245 - protein, 18 aa, synthetic construct
KTINTVRSPHSKAQNQQT

SEQ ID NO: 4246 - protein, 18 aa, synthetic construct
KTKLRSGSPHSKAQNQQT

SEQ ID NO: 4247 - protein, 18 aa, synthetic construct
KTRLRSGSPHSKAQNQQT

SEQ ID NO: 4248 - protein, 18 aa, synthetic construct
KWLLGSGSPHSKAQNQQT

SEQ ID NO: 4249 - protein, 18 aa, synthetic construct
KWSQGSGSPHSKAQNQQT

SEQ ID NO: 4250 - protein, 18 aa, synthetic construct
KWYLGSGSPHSKAQNQQT

SEQ ID NO: 4251 - protein, 18 aa, synthetic construct
KYHSGSGSPHSKAQNQQT

SEQ ID NO: 4252 - protein, 18 aa, synthetic construct
KYLPGSGSPHSKAQNQQT

SEQ ID NO: 4253 - protein, 18 aa, synthetic construct
KAINGGGSPHSKTQNQQT

SEQ ID NO: 4254 - protein, 18 aa, synthetic construct
KAINGHDSPHKRSPNQQT

SEQ ID NO: 4255 - protein, 18 aa, synthetic construct
KAINGHDSPHKSFSPQQT

SEQ ID NO: 4256 - protein, 18 aa, synthetic construct
KAINGHDSPHKSGENQQP

SEQ ID NO: 4257 - protein, 18 aa, synthetic construct
KAINGHDSPHKSGQLART

SEQ ID NO: 4258 - protein, 18 aa, synthetic construct
KAINGHDSPHKSGQNAFL

SEQ ID NO: 4259 - protein, 18 aa, synthetic construct
KAINGHDSPHKSGQNAYT

SEQ ID NO: 4260 - protein, 18 aa, synthetic construct
KAINGHDSPHKSGQNFAS

SEQ ID NO: 4261 - protein, 18 aa, synthetic construct
KAINGHDSPHKSGQNLAS

SEQ ID NO: 4262 - protein, 18 aa, synthetic construct
KAINGHDSPHKSGQNLGS

SEQ ID NO: 4263 - protein, 18 aa, synthetic construct
KAINGHDSPHKSGQNLKF

SEQ ID NO: 4264 - protein, 18 aa, synthetic construct
KAINGHDSPHKSGQNLLK

SEQ ID NO: 4265 - protein, 18 aa, synthetic construct
KAINGHDSPHKSGQNLSR

SEQ ID NO: 4266 - protein, 18 aa, synthetic construct
KAINGHDSPHKSGQNLSS

SEQ ID NO: 4267 - protein, 18 aa, synthetic construct
KAINGHDSPHKSGQNSLG

SEQ ID NO: 4268 - protein, 18 aa, synthetic construct
KAINGHDSPHKSGQNTLQ

SEQ ID NO: 4269 - protein, 18 aa, synthetic construct
KAINGHDSPHKSGQNTSL

SEQ ID NO: 4270 - protein, 18 aa, synthetic construct
KAINGHDSPHKSGQRLGT

SEQ ID NO: 4271 - protein, 18 aa, synthetic construct
KAINGHDSPHKSGQRNYT

SEQ ID NO: 4272 - protein, 18 aa, synthetic construct
KAINGHDSPHKSGQRPST

SEQ ID NO: 4273 - protein, 18 aa, synthetic construct
KAINGHDSPHKSGQRPVT

SEQ ID NO: 4274 - protein, 18 aa, synthetic construct
KAINGHDSPHKSGQVPST

SEQ ID NO: 4275 - protein, 18 aa, synthetic construct
KAINGHDSPHKSLSNQQT

SEQ ID NO: 4276 - protein, 18 aa, synthetic construct
KAINGHDSPHKSVLSQQT

SEQ ID NO: 4277 - protein, 18 aa, synthetic construct
KAINGHDSPHKTLQNQQT

SEQ ID NO: 4278 - protein, 18 aa, synthetic construct
KAINGHNSPHSKAQNQQT

SEQ ID NO: 4279 - protein, 18 aa, synthetic construct
KAINGLDSPHSKAQNQQT

SEQ ID NO: 4280 - protein, 18 aa, synthetic construct
KAINGSGSPHKSGQNQQT

SEQ ID NO: 4281 - protein, 18 aa, synthetic construct
KAINGSGSPHSKAQGQQT

SEQ ID NO: 4282 - protein, 18 aa, synthetic construct
KAINGSGSPHSKAQLSGT

SEQ ID NO: 4283 - protein, 18 aa, synthetic construct
KAINGSGSPHSKAQNGSL

SEQ ID NO: 4284 - protein, 18 aa, synthetic construct
KAINGSGSPHSKAQNSLL

SEQ ID NO: 4285 - protein, 18 aa, synthetic construct
KAINGSGSPHSKAVGLQT

SEQ ID NO: 4286 - protein, 18 aa, synthetic construct
KAINGSGSPHSKSLLQQT

SEQ ID NO: 4287 - protein, 18 aa, synthetic construct
KAINGSGSPHSKSLPQQT

SEQ ID NO: 4288 - protein, 18 aa, synthetic construct
KAINGSGSPHSKSTFQQT

SEQ ID NO: 4289 - protein, 18 aa, synthetic construct
KAITGHDSPHSKAQNQQT

SEQ ID NO: 4290 - protein, 18 aa, synthetic construct
KDVMGSGSPHSKAQNQQT

SEQ ID NO: 4291 - protein, 18 aa, synthetic construct
KEIVGSGSPHSKAQNQQT

SEQ ID NO: 4292 - protein, 18 aa, synthetic construct
KEIYGSGSPHSKAQNQQT

SEQ ID NO: 4293 - protein, 18 aa, synthetic construct
KELSGSGSPHSKAQNQQT

SEQ ID NO: 4294 - protein, 18 aa, synthetic construct
KETIGSGSPHSKAQNQQT

SEQ ID NO: 4295 - protein, 18 aa, synthetic construct
KEVLGSGSPHSKAQNQQT

SEQ ID NO: 4296 - protein, 18 aa, synthetic construct
KFALGHDSPHKSGQKQQT

SEQ ID NO: 4297 - protein, 18 aa, synthetic construct
KIINGHDSPHKSGQNLVL

SEQ ID NO: 4298 - protein, 18 aa, synthetic construct
KIINGHDSPHKSGQRNYT

SEQ ID NO: 4299 - protein, 18 aa, synthetic construct
KIINGHDSPHSKAQNQQT

SEQ ID NO: 4300 - protein, 18 aa, synthetic construct
KLNPGHDSPHKSGQTQQT

SEQ ID NO: 4301 - protein, 18 aa, synthetic construct
KLNRGHDSPHKSGQNQQS

SEQ ID NO: 4302 - protein, 18 aa, synthetic construct
KLSSGHDSPHKSGQNQQN

SEQ ID NO: 4303 - protein, 18 aa, synthetic construct
KNINGHDSPHSKAQNQQT

SEQ ID NO: 4304 - protein, 18 aa, synthetic construct
KNNDGSGSPHSKAQNQQT

SEQ ID NO: 4305 - protein, 18 aa, synthetic construct
KNVMGSGSPHSKAQNQQT

SEQ ID NO: 4306 - protein, 18 aa, synthetic construct
KPINGHDSPHKSGQNKLS

SEQ ID NO: 4307 - protein, 18 aa, synthetic construct
KPINGHDSPHKSGQNLSS

SEQ ID NO: 4308 - protein, 18 aa, synthetic construct
KPINGHDSPHSKAQNQQT

SEQ ID NO: 4309 - protein, 18 aa, synthetic construct
KRINGHDSPHSKAQNQQT

SEQ ID NO: 4310 - protein, 18 aa, synthetic construct
KSCSGHDSPHKSGQNQQS

SEQ ID NO: 4311 - protein, 18 aa, synthetic construct
KSINGHDSPHKSGQNLAS

SEQ ID NO: 4312 - protein, 18 aa, synthetic construct
KSINGHDSPHKSGQNLFL

SEQ ID NO: 4313 - protein, 18 aa, synthetic construct
KSINGHDSPHKSGQNLLM

SEQ ID NO: 4314 - protein, 18 aa, synthetic construct
KSINGHDSPHKSGQNLLQ

SEQ ID NO: 4315 - protein, 18 aa, synthetic construct
KSINGHDSPHKSGQNSLG

SEQ ID NO: 4316 - protein, 18 aa, synthetic construct
KSINGHDSPHKSGQNTLQ

SEQ ID NO: 4317 - protein, 18 aa, synthetic construct
KSINGHDSPHKSSSNQQT

SEQ ID NO: 4318 - protein, 18 aa, synthetic construct
KSINGHDSPHKYKLNQQT

SEQ ID NO: 4319 - protein, 18 aa, synthetic construct
KSINGSGSPHKSGQKQQT

SEQ ID NO: 4320 - protein, 18 aa, synthetic construct
KSINGSGSPHKSGQNQQT

SEQ ID NO: 4321 - protein, 18 aa, synthetic construct
KSINGSGSPHSKAQGLST

SEQ ID NO: 4322 - protein, 18 aa, synthetic construct
KSINGSGSPHSKAQLLGT

SEQ ID NO: 4323 - protein, 18 aa, synthetic construct
KSINGSGSPHSKTSWQQT

SEQ ID NO: 4324 - protein, 18 aa, synthetic construct
KSMNGHDSPHSKAQNQQT

SEQ ID NO: 4325 - protein, 18 aa, synthetic construct
KSTLGSGSPHSKAQNQHT

SEQ ID NO: 4326 - protein, 18 aa, synthetic construct
KSTLGSGSPHSKAQNQQN

SEQ ID NO: 4327 - protein, 18 aa, synthetic construct
KSTVGSGSPHSKAQTQQT

SEQ ID NO: 4328 - protein, 18 aa, synthetic construct
KTCKESGSPHSKAQNQQT

SEQ ID NO: 4329 - protein, 18 aa, synthetic construct
KTCKGSGSPHSKAQNQQT

SEQ ID NO: 4330 - protein, 18 aa, synthetic construct
KTCKSSGSPHSKAQNQQT

SEQ ID NO: 4331 - protein, 18 aa, synthetic construct
KTDMGSGSPHSKAQNQQT

SEQ ID NO: 4332 - protein, 18 aa, synthetic construct
KTDNGIGSPHSKAQNQQT

SEQ ID NO: 4333 - protein, 18 aa, synthetic construct
KTEGGSGSPHSKAQNQQT

SEQ ID NO: 4334 - protein, 18 aa, synthetic construct
KTEHHSGSPHSKAQNQQT

SEQ ID NO: 4335 - protein, 18 aa, synthetic construct
KTEKDSGSPHSKAQNQQT

SEQ ID NO: 4336 - protein, 18 aa, synthetic construct
KTELGHDSPHKRGQNQQT

SEQ ID NO: 4337 - protein, 18 aa, synthetic construct
KTESVSGSPHSKAQNQQT

SEQ ID NO: 4338 - protein, 18 aa, synthetic construct
KTETNSGSPHSKAQNQQT

SEQ ID NO: 4339 - protein, 18 aa, synthetic construct
KTETYSGSPHSKAQNQQT

SEQ ID NO: 4340 - protein, 18 aa, synthetic construct
KTEWLSGSPHSKAQNQQT

SEQ ID NO: 4341 - protein, 18 aa, synthetic construct
KTFNGSGSPHKSGQNQQT

SEQ ID NO: 4342 - protein, 18 aa, synthetic construct
KTGLRHDSPHKSGQKQQT

SEQ ID NO: 4343 - protein, 18 aa, synthetic construct
KTGLRHDSPHKSGQNQQS

SEQ ID NO: 4344 - protein, 18 aa, synthetic construct
KTGVTHDSPHKSGQKQQT

SEQ ID NO: 4345 - protein, 18 aa, synthetic construct
KTIDGHESPHSKAQNQQT

SEQ ID NO: 4346 - protein, 18 aa, synthetic construct
KTIEGHDSPHKSGQTQQT

SEQ ID NO: 4347 - protein, 18 aa, synthetic construct
KTIHGHDSPHSKAQNQQT

SEQ ID NO: 4348 - protein, 18 aa, synthetic construct
KTIHGHESPHSKAQNQQT

SEQ ID NO: 4349 - protein, 18 aa, synthetic construct
KTIIGHDSPHKSGQNRSS

SEQ ID NO: 4350 - protein, 18 aa, synthetic construct
KTIIGHDSPHKSGQRLGT

SEQ ID NO: 4351 - protein, 18 aa, synthetic construct
KTIIGSGSPHKSGQNQQT

SEQ ID NO: 4352 - protein, 18 aa, synthetic construct
KTIKGHDSPHKSGQNMLF

SEQ ID NO: 4353 - protein, 18 aa, synthetic construct
KTILGSGSPHSKAQNLQT

SEQ ID NO: 4354 - protein, 18 aa, synthetic construct
KTINGCSSPHWKAQNQQT

SEQ ID NO: 4355 - protein, 18 aa, synthetic construct
KTINGGGSTHSKAQNQQT

SEQ ID NO: 4356 - protein, 18 aa, synthetic construct
KTINGHDSPHKAGQSQQT

SEQ ID NO: 4357 - protein, 18 aa, synthetic construct
KTINGHDSPHKRGQNVPS

SEQ ID NO: 4358 - protein, 18 aa, synthetic construct
KTINGHDSPHKRGRSYQT

SEQ ID NO: 4359 - protein, 18 aa, synthetic construct
KTINGHDSPHKTGQNPPT

SEQ ID NO: 4360 - protein, 18 aa, synthetic construct
KTINGHDSPHSKAENQQT

SEQ ID NO: 4361 - protein, 18 aa, synthetic construct
KTINGHDSPHSKALSLQT

SEQ ID NO: 4362 - protein, 18 aa, synthetic construct
KTINGHDSPHSKAQGQQT

SEQ ID NO: 4363 - protein, 18 aa, synthetic construct
KTINGHDSPHSKAQHQQT

SEQ ID NO: 4364 - protein, 18 aa, synthetic construct
KTINGHDSPHSKAQIQQT

SEQ ID NO: 4365 - protein, 18 aa, synthetic construct
KTINGHDSPHSKAQKQQT

SEQ ID NO: 4366 - protein, 18 aa, synthetic construct
KTINGHDSPHSKAQNLSS

SEQ ID NO: 4367 - protein, 18 aa, synthetic construct
KTINGHDSPHSKAQNPQT

SEQ ID NO: 4368 - protein, 18 aa, synthetic construct
KTINGHDSPHSKAQNQET

SEQ ID NO: 4369 - protein, 18 aa, synthetic construct
KTINGHDSPHSKAQNQHT

SEQ ID NO: 4370 - protein, 18 aa, synthetic construct
KTINGHDSPHSKAQNQLT

SEQ ID NO: 4371 - protein, 18 aa, synthetic construct
KTINGHDSPHSKAQNQPT

SEQ ID NO: 4372 - protein, 18 aa, synthetic construct
KTINGHDSPHSKAQNQQA

SEQ ID NO: 4373 - protein, 18 aa, synthetic construct
KTINGHDSPHSKAQNTGS

SEQ ID NO: 4374 - protein, 18 aa, synthetic construct
KTINGHDSPHSKAQSQQT

SEQ ID NO: 4375 - protein, 18 aa, synthetic construct
KTINGHDSPHSKAQTQQT

SEQ ID NO: 4376 - protein, 18 aa, synthetic construct
KTINGHDSPHSKAQYQQT

SEQ ID NO: 4377 - protein, 18 aa, synthetic construct
KTINGHDSPHSKARNQQT

SEQ ID NO: 4378 - protein, 18 aa, synthetic construct
KTINGHDSPHSKLPGQQT

SEQ ID NO: 4379 - protein, 18 aa, synthetic construct
KTINGHDSPHSKSPNQQT

SEQ ID NO: 4380 - protein, 18 aa, synthetic construct
KTINGHESPHKSGQNAFL

SEQ ID NO: 4381 - protein, 18 aa, synthetic construct
KTINGIGSPHSKAPNEQT

SEQ ID NO: 4382 - protein, 18 aa, synthetic construct
KTINGQDSPHKSGQNLHM

SEQ ID NO: 4383 - protein, 18 aa, synthetic construct
KTINGRGSPHSKAQIGMT

SEQ ID NO: 4384 - protein, 18 aa, synthetic construct
KTINGRGSPHSKAQNQVL

SEQ ID NO: 4385 - protein, 18 aa, synthetic construct
KTINGRGSPHSKAQSPTT

SEQ ID NO: 4386 - protein, 18 aa, synthetic construct
KTINGRGSPHSKATSFQT

SEQ ID NO: 4387 - protein, 18 aa, synthetic construct
KTINGSGSPHFVVQNQQT

SEQ ID NO: 4388 - protein, 18 aa, synthetic construct
KTINGSGSPHKRGQKQQT

SEQ ID NO: 4389 - protein, 18 aa, synthetic construct
KTINGSGSPHKRGQNQET

SEQ ID NO: 4390 - protein, 18 aa, synthetic construct
KTINGSGSPHKRGQNQLT

SEQ ID NO: 4391 - protein, 18 aa, synthetic construct
KTINGSGSPHKRGRNQQT

SEQ ID NO: 4392 - protein, 18 aa, synthetic construct
KTINGSGSPHKSGGNQQT

SEQ ID NO: 4393 - protein, 18 aa, synthetic construct
KTINGSGSPHKSGHNQET

SEQ ID NO: 4394 - protein, 18 aa, synthetic construct
KTINGSGSPHKSGHNQLT

SEQ ID NO: 4395 - protein, 18 aa, synthetic construct
KTINGSGSPHKSGHNQQN

SEQ ID NO: 4396 - protein, 18 aa, synthetic construct
KTINGSGSPHKSGLNQLT

SEQ ID NO: 4397 - protein, 18 aa, synthetic construct
KTINGSGSPHKSGPNQQT

SEQ ID NO: 4398 - protein, 18 aa, synthetic construct
KTINGSGSPHKSGQGQQT

SEQ ID NO: 4399 - protein, 18 aa, synthetic construct
KTINGSGSPHKSGQHLQT

SEQ ID NO: 4400 - protein, 18 aa, synthetic construct
KTINGSGSPHKSGQHQQT

SEQ ID NO: 4401 - protein, 18 aa, synthetic construct
KTINGSGSPHKSGQKHQT

SEQ ID NO: 4402 - protein, 18 aa, synthetic construct
KTINGSGSPHKSGQKQQS

SEQ ID NO: 4403 - protein, 18 aa, synthetic construct
KTINGSGSPHKSGQNEQT

SEQ ID NO: 4404 - protein, 18 aa, synthetic construct
KTINGSGSPHKSGQNHQT

SEQ ID NO: 4405 - protein, 18 aa, synthetic construct
KTINGSGSPHKSGQNKQT

SEQ ID NO: 4406 - protein, 18 aa, synthetic construct
KTINGSGSPHKSGQNKTS

SEQ ID NO: 4407 - protein, 18 aa, synthetic construct
KTINGSGSPHKSGQNQEA

SEQ ID NO: 4408 - protein, 18 aa, synthetic construct
KTINGSGSPHKSGQNQET

SEQ ID NO: 4409 - protein, 18 aa, synthetic construct
KTINGSGSPHKSGQNQKT

SEQ ID NO: 4410 - protein, 18 aa, synthetic construct
KTINGSGSPHKSGQNQQI

SEQ ID NO: 4411 - protein, 18 aa, synthetic construct
KTINGSGSPHKSGQNQQR

SEQ ID NO: 4412 - protein, 18 aa, synthetic construct
KTINGSGSPHKSGQNQRT

SEQ ID NO: 4413 - protein, 18 aa, synthetic construct
KTINGSGSPHKSGQNQYT

SEQ ID NO: 4414 - protein, 18 aa, synthetic construct
KTINGSGSPHKSGQRQQT

SEQ ID NO: 4415 - protein, 18 aa, synthetic construct
KTINGSGSPHKSGQSQQT

SEQ ID NO: 4416 - protein, 18 aa, synthetic construct
KTINGSGSPHKSGQYQRT

SEQ ID NO: 4417 - protein, 18 aa, synthetic construct
KTINGSGSPHKSGRNQQA

SEQ ID NO: 4418 - protein, 18 aa, synthetic construct
KTINGSGSPHKSRHNQQT

SEQ ID NO: 4419 - protein, 18 aa, synthetic construct
KTINGSGSPHKSRQYQQT

SEQ ID NO: 4420 - protein, 18 aa, synthetic construct
KTINGSGSPHRKAQAPGT

SEQ ID NO: 4421 - protein, 18 aa, synthetic construct
KTINGSGSPHSKAAMKQT

SEQ ID NO: 4422 - protein, 18 aa, synthetic construct
KTINGSGSPHSKAGRQQT

SEQ ID NO: 4423 - protein, 18 aa, synthetic construct
KTINGSGSPHSKAGRTQT

SEQ ID NO: 4424 - protein, 18 aa, synthetic construct
KTINGSGSPHSKAKSNQT

SEQ ID NO: 4425 - protein, 18 aa, synthetic construct
KTINGSGSPHSKALKTQT

SEQ ID NO: 4426 - protein, 18 aa, synthetic construct
KTINGSGSPHSKAPRTQT

SEQ ID NO: 4427 - protein, 18 aa, synthetic construct
KTINGSGSPHSKAQAART

SEQ ID NO: 4428 - protein, 18 aa, synthetic construct
KTINGSGSPHSKAQAILT

SEQ ID NO: 4429 - protein, 18 aa, synthetic construct
KTINGSGSPHSKAQCRGT

SEQ ID NO: 4430 - protein, 18 aa, synthetic construct
KTINGSGSPHSKAQGLRT

SEQ ID NO: 4431 - protein, 18 aa, synthetic construct
KTINGSGSPHSKAQKGVL

SEQ ID NO: 4432 - protein, 18 aa, synthetic construct
KTINGSGSPHSKAQKSNT

SEQ ID NO: 4433 - protein, 18 aa, synthetic construct
KTINGSGSPHSKAQNNKF

SEQ ID NO: 4434 - protein, 18 aa, synthetic construct
KTINGSGSPHSKAQNRRT

SEQ ID NO: 4435 - protein, 18 aa, synthetic construct
KTINGSGSPHSKAQPKQT

SEQ ID NO: 4436 - protein, 18 aa, synthetic construct
KTINGSGSPHSKAQRAPT

SEQ ID NO: 4437 - protein, 18 aa, synthetic construct
KTINGSGSPHSKAQREHT

SEQ ID NO: 4438 - protein, 18 aa, synthetic construct
KTINGSGSPHSKAQRFGT

SEQ ID NO: 4439 - protein, 18 aa, synthetic construct
KTINGSGSPHSKAQRPCT

SEQ ID NO: 4440 - protein, 18 aa, synthetic construct
KTINGSGSPHSKAQRQAT

SEQ ID NO: 4441 - protein, 18 aa, synthetic construct
KTINGSGSPHSKAQRQPT

SEQ ID NO: 4442 - protein, 18 aa, synthetic construct
KTINGSGSPHSKAQTKLT

SEQ ID NO: 4443 - protein, 18 aa, synthetic construct
KTINGSGSPHSKAQTTHT

SEQ ID NO: 4444 - protein, 18 aa, synthetic construct
KTINGSGSPHSKAQVQRT

SEQ ID NO: 4445 - protein, 18 aa, synthetic construct
KTINGSGSPHSKAQVVRT

SEQ ID NO: 4446 - protein, 18 aa, synthetic construct
KTINGSGSPHSKAQWPNT

SEQ ID NO: 4447 - protein, 18 aa, synthetic construct
KTINGSGSPHSKAQYPST

SEQ ID NO: 4448 - protein, 18 aa, synthetic construct
KTINGSGSPHSKARALQT

SEQ ID NO: 4449 - protein, 18 aa, synthetic construct
KTINGSGSPHSKARDQHT

SEQ ID NO: 4450 - protein, 18 aa, synthetic construct
KTINGSGSPHSKARFQQT

SEQ ID NO: 4451 - protein, 18 aa, synthetic construct
KTINGSGSPHSKARRTQT

SEQ ID NO: 4452 - protein, 18 aa, synthetic construct
KTINGSGSPHSKARSLQT

SEQ ID NO: 4453 - protein, 18 aa, synthetic construct
KTINGSGSPHSKARVIQT

SEQ ID NO: 4454 - protein, 18 aa, synthetic construct
KTINGSGSPHSKAWYLQT

SEQ ID NO: 4455 - protein, 18 aa, synthetic construct
KTINGSGSPHSKGGGQQT

SEQ ID NO: 4456 - protein, 18 aa, synthetic construct
KTINGSGSPHSKGSRQQT

SEQ ID NO: 4457 - protein, 18 aa, synthetic construct
KTINGSGSPHSKLQRQQT

SEQ ID NO: 4458 - protein, 18 aa, synthetic construct
KTINGSGSPHSKMLRQQT

SEQ ID NO: 4459 - protein, 18 aa, synthetic construct
KTINGSGSPHSKSSIKQT

SEQ ID NO: 4460 - protein, 18 aa, synthetic construct
KTINGSGSPHSKVRFQQT

SEQ ID NO: 4461 - protein, 18 aa, synthetic construct
KTINGSGSPHSVVWNQQT

SEQ ID NO: 4462 - protein, 18 aa, synthetic construct
KTINGSTSPHKLAQNQQP

SEQ ID NO: 4463 - protein, 18 aa, synthetic construct
KTINRHDSPHKSGQRPST

SEQ ID NO: 4464 - protein, 18 aa, synthetic construct
KTINRIMSPHSKAQNQQT

SEQ ID NO: 4465 - protein, 18 aa, synthetic construct
KTINTARSPHSKAQNQQT

SEQ ID NO: 4466 - protein, 18 aa, synthetic construct
KTISGHDSPHSKAQNQQT

SEQ ID NO: 4467 - protein, 18 aa, synthetic construct
KTISGSGSPHKSGQNQQT

SEQ ID NO: 4468 - protein, 18 aa, synthetic construct
KTITGHDSPHKSGQRLGT

SEQ ID NO: 4469 - protein, 18 aa, synthetic construct
KTITGSGSPHKSGQNQQT

SEQ ID NO: 4470 - protein, 18 aa, synthetic construct
KTIYGHDSPHKSGQRLGT

SEQ ID NO: 4471 - protein, 18 aa, synthetic construct
KTLNGHDSPHKSGQNLFL

SEQ ID NO: 4472 - protein, 18 aa, synthetic construct
KTLNGHDSPHKSGQNLSS

SEQ ID NO: 4473 - protein, 18 aa, synthetic construct
KTLSFHDSPHKSGQNQQS

SEQ ID NO: 4474 - protein, 18 aa, synthetic construct
KTSNGSGSPHSKAQNTMT

SEQ ID NO: 4475 - protein, 18 aa, synthetic construct
KTTNGHDSPHSKAQNQQT

SEQ ID NO: 4476 - protein, 18 aa, synthetic construct
KTVNGGGSPHSKAQNQQT

SEQ ID NO: 4477 - protein, 18 aa, synthetic construct
KTVNGHDSPHKSGQNVSL

SEQ ID NO: 4478 - protein, 18 aa, synthetic construct
KTVNGHDSPHKSGQRPST

SEQ ID NO: 4479 - protein, 18 aa, synthetic construct
KTVNGHDSPHKSGQTQQA

SEQ ID NO: 4480 - protein, 18 aa, synthetic construct
KTVNGHESPHSKAQNQQT

SEQ ID NO: 4481 - protein, 18 aa, synthetic construct
KTVNGSGSPHSKAQGLST

SEQ ID NO: 4482 - protein, 18 aa, synthetic construct
KTVNGSGSPHSKAQNVTS

SEQ ID NO: 4483 - protein, 18 aa, synthetic construct
KTVPASGSPHSKAQNQQT

SEQ ID NO: 4484 - protein, 18 aa, synthetic construct
NTINGSGSPHSKAHNQQT

SEQ ID NO: 4485 - protein, 18 aa, synthetic construct
TTINGGGSPHSKAQNQQT

SEQ ID NO: 4486 - protein, 8 aa, synthetic construct
HDSPHSKA

SEQ ID NO: 4487 - protein, 9 aa, synthetic construct
NGSGQNQQT

SEQ ID NO: 4488-4672 - skipped (185 entries)

SEQ ID NO: 4673 - DNA, 23 bp, synthetic construct
  source 1..23: mol_type = other DNA
acaaacaccattgtcacactcca

SEQ ID NO: 4674 - DNA, 71 bp, synthetic construct
  source 1..71: mol_type = other DNA
acaaacaccattgtcacactccacacaaacaccattgtcacactccacacaaacaccattgtcacactcca

SEQ ID NO: 4675 - DNA, 23 bp, synthetic construct
  source 1..23: mol_type = other DNA
tccataaagtaggaaacactaca

SEQ ID NO: 4676 - DNA, 22 bp, synthetic construct
  source 1..22: mol_type = other DNA
agtgaattctaccagtgccata

SEQ ID NO: 4677 - DNA, 24 bp, synthetic construct
  source 1..24: mol_type = other DNA
agtgtgagttctaccattgccaaa

SEQ ID NO: 4678 - DNA, 23 bp, synthetic construct
  source 1..23: mol_type = other DNA
agcaaaaatgtgctagtgccaaa

SEQ ID NO: 4679 - DNA, 22 bp, synthetic construct
  source 1..22: mol_type = other DNA
atacatacttctttacattcca

SEQ ID NO: 4680 - protein, 7 aa, synthetic construct
TLAVPFK

SEQ ID NO: 4681 - protein, 18 aa, synthetic construct
KTINGSGSPHSKAQARKT

SEQ ID NO: 4682 - protein, 18 aa, synthetic construct
KYIVGSGSPHSKAQNQQT

SEQ ID NO: 4683 - protein, 18 aa, synthetic construct
KTINGSGSPHSMYMNQQT

SEQ ID NO: 4684 - protein, 18 aa, synthetic construct
KTINGSGSPHSKAFYRQT

SEQ ID NO: 4685 - protein, 18 aa, synthetic construct
KTINGSGSPHSKLKRQQT

SEQ ID NO: 4686 - protein, 18 aa, synthetic construct
KTINGSGSPHSKRHRQQT

SEQ ID NO: 4687 - protein, 18 aa, synthetic construct
KTINGSGSPHSKAQKCIT

SEQ ID NO: 4688 - protein, 18 aa, synthetic construct
KTINGSGSPHSKWRLQQT

SEQ ID NO: 4689 - protein, 18 aa, synthetic construct
KTINGSGSPHSRCRNQQT

SEQ ID NO: 4690 - protein, 18 aa, synthetic construct
KTINGSGSPHSFTCNQQT

SEQ ID NO: 4691 - protein, 18 aa, synthetic construct
KTINGSGSPHSKFFIQQT

SEQ ID NO: 4692 - protein, 18 aa, synthetic construct
KTINGSGSPHSKAQYSRT

SEQ ID NO: 4693 - protein, 18 aa, synthetic construct
KTINGSGSPHCALQNQQT

SEQ ID NO: 4694 - protein, 13 aa, synthetic construct
  VARIANT 7: note = S, C, F, or V
  VARIANT 8: note = K, L, R, I, E, Y, V, or S
  VARIANT 9: note = A, R, L, G, I, Y, S, F, or W
  VARIANT 10: note = W, Q, R, G, L, V, S, or F
  VARIANT 11: note = N, Y, R, C, K, or L
  VARIANT 12: note = Q, G, K, R, T, L, or Y
  VARIANT 13: note = Q, L, R, or V
GSGSPHXXXXXXX

SEQ ID NO: 4695 - protein, 6 aa, synthetic construct
GSGSPH

SEQ ID NO: 4696 - protein, 11 aa, synthetic construct
  VARIANT 7: note = S, I, F, V, C, Y, W, R, P, L, Q, M, K, or G
  VARIANT 8: note = K, M, R, F, V, C, P, Y, L, W, G, N, S, T, I, or A
  VARIANT 9: note = A, Y, L, R, W, C, T, F, H, I, P, M, K, S, V, G, Q, or N
  VARIANT 10: note = Q, M, F, K, H, R, C, W, P, V, L, G, S, Y, I, A, T, D, N, or E
  VARIANT 11: note = A, N, Y, R, K, L, I, M, Q, S, C, W, F, T, G, V, or P
GSGSPHXXXXX

SEQ ID NO: 4697 - protein, 9 aa, synthetic construct
GSGSPHSKA

SEQ ID NO: 4698 - protein, 9 aa, synthetic construct
GHDSPHKSG

SEQ ID NO: 4699 - protein, 12 aa, synthetic construct
  VARIANT 1: note = T, M, A, C, I, R, L, D, F, V, Q, N, or H
  VARIANT 2: note = I, P, E, N, D, S, A, T, M, or Q
  VARIANT 3: note = N, E, G, Y, W, M, T, I, K, Q, F, S, V, A, or L
  VARIANT 4: note = G, D, R, or E
  VARIANT 5: note = H, Q, N, or D
  VARIANT 6: note = D or R
XXXXXXSPHKSG

SEQ ID NO: 4700 - protein, 4 aa, synthetic construct
SPHS

SEQ ID NO: 4701 - protein, 5 aa, synthetic construct
SPHSK

SEQ ID NO: 4702 - protein, 4 aa, synthetic construct
HDSP

SEQ ID NO: 4703 - protein, 5 aa, synthetic construct
HDSPH

SEQ ID NO: 4704 - protein, 5 aa, synthetic construct
SPHKS

SEQ ID NO: 4705 - protein, 5 aa, synthetic construct
SPHAR

SEQ ID NO: 4706 - protein, 5 aa, synthetic construct
SPHVK

SEQ ID NO: 4707 - protein, 5 aa, synthetic construct
SPHAS

SEQ ID NO: 4708 - protein, 5 aa, synthetic construct
SPHKK

SEQ ID NO: 4709 - protein, 5 aa, synthetic construct
SPHVR

SEQ ID NO: 4710 - protein, 5 aa, synthetic construct
SPHRK

SEQ ID NO: 4711 - protein, 5 aa, synthetic construct
SPHKT

SEQ ID NO: 4712 - protein, 5 aa, synthetic construct
SPHKF

SEQ ID NO: 4713 - protein, 5 aa, synthetic construct
SPHKI

SEQ ID NO: 4714 - protein, 5 aa, synthetic construct
SPHKL

SEQ ID NO: 4715 - protein, 5 aa, synthetic construct
SPHKY

SEQ ID NO: 4716 - protein, 5 aa, synthetic construct
SPHTR

SEQ ID NO: 4717 - protein, 5 aa, synthetic construct
SPHKR

SEQ ID NO: 4718 - protein, 5 aa, synthetic construct
SPHGA

SEQ ID NO: 4719 - protein, 5 aa, synthetic construct
SPHSR

SEQ ID NO: 4720 - protein, 5 aa, synthetic construct
SPHSL

SEQ ID NO: 4721 - protein, 5 aa, synthetic construct
SPHSS

SEQ ID NO: 4722 - protein, 5 aa, synthetic construct
SPHFL

SEQ ID NO: 4723 - protein, 5 aa, synthetic construct
SPHWK

SEQ ID NO: 4724 - protein, 5 aa, synthetic construct
SPHGK

SEQ ID NO: 4725 - protein, 5 aa, synthetic construct
SPHTK

SEQ ID NO: 4726 - protein, 5 aa, synthetic construct
SPHNK

SEQ ID NO: 4727 - protein, 5 aa, synthetic construct
SPHAK

SEQ ID NO: 4728 - protein, 5 aa, synthetic construct
SPHKH

SEQ ID NO: 4729 - protein, 5 aa, synthetic construct
SPHKM

SEQ ID NO: 4730 - protein, 5 aa, synthetic construct
SPHRS

SEQ ID NO: 4731 - protein, 6 aa, synthetic construct
SPHSKT

SEQ ID NO: 4732 - protein, 6 aa, synthetic construct
SPHSKG

SEQ ID NO: 4733 - protein, 6 aa, synthetic construct
SPHGKA

SEQ ID NO: 4734 - protein, 6 aa, synthetic construct
SPHNKA

SEQ ID NO: 4735 - protein, 6 aa, synthetic construct
SPHSKN

SEQ ID NO: 4736 - protein, 6 aa, synthetic construct
SPHAKA

SEQ ID NO: 4737 - protein, 6 aa, synthetic construct
SPHSKV

SEQ ID NO: 4738 - protein, 6 aa, synthetic construct
SPHKTG

SEQ ID NO: 4739 - protein, 6 aa, synthetic construct
SPHTKA

SEQ ID NO: 4740 - protein, 6 aa, synthetic construct
SPHKSL

SEQ ID NO: 4741 - protein, 6 aa, synthetic construct
SPHKSE

SEQ ID NO: 4742 - protein, 6 aa, synthetic construct
SPHKSV

SEQ ID NO: 4743 - protein, 6 aa, synthetic construct
SPHKSW

SEQ ID NO: 4744 - protein, 6 aa, synthetic construct
SPHKSN

SEQ ID NO: 4745 - protein, 6 aa, synthetic construct
SPHKHG

SEQ ID NO: 4746 - protein, 6 aa, synthetic construct
SPHKSQ

SEQ ID NO: 4747 - protein, 6 aa, synthetic construct
SPHKSK

SEQ ID NO: 4748 - protein, 6 aa, synthetic construct
SPHKLW

SEQ ID NO: 4749 - protein, 6 aa, synthetic construct
SPHWKG

SEQ ID NO: 4750 - protein, 6 aa, synthetic construct
SPHKMG

SEQ ID NO: 4751 - protein, 6 aa, synthetic construct
SPHKMA

SEQ ID NO: 4752 - protein, 5 aa, synthetic construct
SGSPH

SEQ ID NO: 4753 - protein, 5 aa, synthetic construct
QDSPH

SEQ ID NO: 4754 - protein, 5 aa, synthetic construct
RGSPH

SEQ ID NO: 4755 - protein, 5 aa, synthetic construct
SHSPH

SEQ ID NO: 4756 - protein, 5 aa, synthetic construct
QSSPH

SEQ ID NO: 4757 - protein, 5 aa, synthetic construct
DDSPH

SEQ ID NO: 4758 - protein, 5 aa, synthetic construct
HESPH

SEQ ID NO: 4759 - protein, 5 aa, synthetic construct
NYSPH

SEQ ID NO: 4760 - protein, 5 aa, synthetic construct
VGSPH

SEQ ID NO: 4761 - protein, 5 aa, synthetic construct
SCSPH

SEQ ID NO: 4762 - protein, 5 aa, synthetic construct
LLSPH

SEQ ID NO: 4763 - protein, 5 aa, synthetic construct
NGSPH

SEQ ID NO: 4764 - protein, 5 aa, synthetic construct
PGSPH

SEQ ID NO: 4765 - protein, 5 aa, synthetic construct
GGSPH

SEQ ID NO: 4766 - protein, 5 aa, synthetic construct
TGSPH

SEQ ID NO: 4767 - protein, 5 aa, synthetic construct
SVSPH

SEQ ID NO: 4768 - protein, 5 aa, synthetic construct
IGSPH

SEQ ID NO: 4769 - protein, 5 aa, synthetic construct
DGSPH

SEQ ID NO: 4770 - protein, 5 aa, synthetic construct
LGSPH

SEQ ID NO: 4771 - protein, 5 aa, synthetic construct
AGSPH

SEQ ID NO: 4772 - protein, 5 aa, synthetic construct
EGSPH

SEQ ID NO: 4773 - protein, 5 aa, synthetic construct
SASPH

SEQ ID NO: 4774 - protein, 5 aa, synthetic construct
YDSPH

SEQ ID NO: 4775 - protein, 5 aa, synthetic construct
HGSPH

SEQ ID NO: 4776 - protein, 5 aa, synthetic construct
RDSPH

SEQ ID NO: 4777 - protein, 5 aa, synthetic construct
NDSPH

SEQ ID NO: 4778 - protein, 5 aa, synthetic construct
PDSPH

SEQ ID NO: 4779 - protein, 5 aa, synthetic construct
MGSPH

SEQ ID NO: 4780 - protein, 5 aa, synthetic construct
QVSPH

SEQ ID NO: 4781 - protein, 5 aa, synthetic construct
HNSPH

SEQ ID NO: 4782 - protein, 5 aa, synthetic construct
HPSPH

SEQ ID NO: 4783 - protein, 5 aa, synthetic construct
HSSPH

SEQ ID NO: 4784 - protein, 6 aa, synthetic construct
GHDSPH

SEQ ID NO: 4785 - protein, 6 aa, synthetic construct
GQDSPH

SEQ ID NO: 4786 - protein, 6 aa, synthetic construct
VSGSPH

SEQ ID NO: 4787 - protein, 6 aa, synthetic construct
CSGSPH

SEQ ID NO: 4788 - protein, 6 aa, synthetic construct
GRGSPH

SEQ ID NO: 4789 - protein, 6 aa, synthetic construct
CSHSPH

SEQ ID NO: 4790 - protein, 6 aa, synthetic construct
GQSSPH

SEQ ID NO: 4791 - protein, 6 aa, synthetic construct
GSHSPH

SEQ ID NO: 4792 - protein, 6 aa, synthetic construct
GDDSPH

SEQ ID NO: 4793 - protein, 6 aa, synthetic construct
GHESPH

SEQ ID NO: 4794 - protein, 6 aa, synthetic construct
GNYSPH

SEQ ID NO: 4795 - protein, 6 aa, synthetic construct
RVGSPH

SEQ ID NO: 4796 - protein, 6 aa, synthetic construct
GSCSPH

SEQ ID NO: 4797 - protein, 6 aa, synthetic construct
GLLSPH

SEQ ID NO: 4798 - protein, 6 aa, synthetic construct
MSGSPH

SEQ ID NO: 4799 - protein, 6 aa, synthetic construct
RNGSPH

SEQ ID NO: 4800 - protein, 6 aa, synthetic construct
TSGSPH

SEQ ID NO: 4801 - protein, 6 aa, synthetic construct
ISGSPH

SEQ ID NO: 4802 - protein, 6 aa, synthetic construct
GPGSPH

SEQ ID NO: 4803 - protein, 6 aa, synthetic construct
ESGSPH

SEQ ID NO: 4804 - protein, 6 aa, synthetic construct
SSGSPH

SEQ ID NO: 4805 - protein, 6 aa, synthetic construct
GNGSPH

SEQ ID NO: 4806 - protein, 6 aa, synthetic construct
ASGSPH

SEQ ID NO: 4807 - protein, 6 aa, synthetic construct
NSGSPH

SEQ ID NO: 4808 - protein, 6 aa, synthetic construct
LSGSPH

SEQ ID NO: 4809 - protein, 6 aa, synthetic construct
GGGSPH

SEQ ID NO: 4810 - protein, 6 aa, synthetic construct
KSGSPH

SEQ ID NO: 4811 - protein, 6 aa, synthetic construct
HSGSPH

SEQ ID NO: 4812 - protein, 6 aa, synthetic construct
GTGSPH

SEQ ID NO: 4813 - protein, 6 aa, synthetic construct
PSGSPH

SEQ ID NO: 4814 - protein, 6 aa, synthetic construct
GSVSPH

SEQ ID NO: 4815 - protein, 6 aa, synthetic construct
RSGSPH

SEQ ID NO: 4816 - protein, 6 aa, synthetic construct
GIGSPH

SEQ ID NO: 4817 - protein, 6 aa, synthetic construct
WSGSPH

SEQ ID NO: 4818 - protein, 6 aa, synthetic construct
DSGSPH

SEQ ID NO: 4819 - protein, 6 aa, synthetic construct
IDGSPH

SEQ ID NO: 4820 - protein, 6 aa, synthetic construct
GLGSPH

SEQ ID NO: 4821 - protein, 6 aa, synthetic construct
DAGSPH

SEQ ID NO: 4822 - protein, 6 aa, synthetic construct
DGGSPH

SEQ ID NO: 4823 - protein, 6 aa, synthetic construct
MEGSPH

SEQ ID NO: 4824 - protein, 6 aa, synthetic construct
ENGSPH

SEQ ID NO: 4825 - protein, 6 aa, synthetic construct
GSASPH

SEQ ID NO: 4826 - protein, 6 aa, synthetic construct
KNGSPH

SEQ ID NO: 4827 - protein, 6 aa, synthetic construct
KEGSPH

SEQ ID NO: 4828 - protein, 6 aa, synthetic construct
AIGSPH

SEQ ID NO: 4829 - protein, 6 aa, synthetic construct
GYDSPH

SEQ ID NO: 4830 - protein, 6 aa, synthetic construct
GHGSPH

SEQ ID NO: 4831 - protein, 6 aa, synthetic construct
GRDSPH

SEQ ID NO: 4832 - protein, 6 aa, synthetic construct
GNDSPH

SEQ ID NO: 4833 - protein, 6 aa, synthetic construct
GPDSPH

SEQ ID NO: 4834 - protein, 6 aa, synthetic construct
GMGSPH

SEQ ID NO: 4835 - protein, 6 aa, synthetic construct
GQVSPH

SEQ ID NO: 4836 - protein, 6 aa, synthetic construct
GHNSPH

SEQ ID NO: 4837 - protein, 6 aa, synthetic construct
GHPSPH

SEQ ID NO: 4838 - protein, 6 aa, synthetic construct
GHSSPH

SEQ ID NO: 4839 - protein, 7 aa, synthetic construct
SGSPHSK

SEQ ID NO: 4840 - protein, 7 aa, synthetic construct
HDSPHKS

SEQ ID NO: 4841 - protein, 7 aa, synthetic construct
SGSPHAR

SEQ ID NO: 4842 - protein, 7 aa, synthetic construct
SGSPHVK

SEQ ID NO: 4843 - protein, 7 aa, synthetic construct
QDSPHKS

SEQ ID NO: 4844 - protein, 7 aa, synthetic construct
SGSPHKK

SEQ ID NO: 4845 - protein, 7 aa, synthetic construct
SGSPHVR

SEQ ID NO: 4846 - protein, 7 aa, synthetic construct
SGSPHAS

SEQ ID NO: 4847 - protein, 7 aa, synthetic construct
SGSPHRK

SEQ ID NO: 4848 - protein, 7 aa, synthetic construct
SGSPHKT

SEQ ID NO: 4849 - protein, 7 aa, synthetic construct
SHSPHKS

SEQ ID NO: 4850 - protein, 7 aa, synthetic construct
QSSPHRS

SEQ ID NO: 4851 - protein, 7 aa, synthetic construct
RGSPHAS

SEQ ID NO: 4852 - protein, 7 aa, synthetic construct
RGSPHSK

SEQ ID NO: 4853 - protein, 7 aa, synthetic construct
SGSPHKF

SEQ ID NO: 4854 - protein, 7 aa, synthetic construct
SGSPHKI

SEQ ID NO: 4855 - protein, 7 aa, synthetic construct
SGSPHKL

SEQ ID NO: 4856 - protein, 7 aa, synthetic construct
SGSPHKY

SEQ ID NO: 4857 - protein, 7 aa, synthetic construct
SGSPHTR

SEQ ID NO: 4858 - protein, 7 aa, synthetic construct
SHSPHKR

SEQ ID NO: 4859 - protein, 7 aa, synthetic construct
SGSPHGA

SEQ ID NO: 4860 - protein, 7 aa, synthetic construct
HDSPHKR

SEQ ID NO: 4861 - protein, 7 aa, synthetic construct
DDSPHKS

SEQ ID NO: 4862 - protein, 7 aa, synthetic construct
HESPHKS

SEQ ID NO: 4863 - protein, 7 aa, synthetic construct
NYSPHKI

SEQ ID NO: 4864 - protein, 7 aa, synthetic construct
SGSPHSR

SEQ ID NO: 4865 - protein, 7 aa, synthetic construct
SGSPHSL

SEQ ID NO: 4866 - protein, 7 aa, synthetic construct
SGSPHSS

SEQ ID NO: 4867 - protein, 7 aa, synthetic construct
VGSPHSK

SEQ ID NO: 4868 - protein, 7 aa, synthetic construct
SCSPHRK

SEQ ID NO: 4869 - protein, 7 aa, synthetic construct
SGSPHFL

SEQ ID NO: 4870 - protein, 7 aa, synthetic construct
LLSPHWK

SEQ ID NO: 4871 - protein, 7 aa, synthetic construct
NGSPHSK

SEQ ID NO: 4872 - protein, 7 aa, synthetic construct
PGSPHSK

SEQ ID NO: 4873 - protein, 7 aa, synthetic construct
GGSPHSK

SEQ ID NO: 4874 - protein, 7 aa, synthetic construct
TGSPHSK

SEQ ID NO: 4875 - protein, 7 aa, synthetic construct
SVSPHGK

SEQ ID NO: 4876 - protein, 7 aa, synthetic construct
SGSPHTK

SEQ ID NO: 4877 - protein, 7 aa, synthetic construct
IGSPHSK

SEQ ID NO: 4878 - protein, 7 aa, synthetic construct
DGSPHSK

SEQ ID NO: 4879 - protein, 7 aa, synthetic construct
SGSPHNK

SEQ ID NO: 4880 - protein, 7 aa, synthetic construct
LGSPHSK

SEQ ID NO: 4881 - protein, 7 aa, synthetic construct
AGSPHSK

SEQ ID NO: 4882 - protein, 7 aa, synthetic construct
EGSPHSK

SEQ ID NO: 4883 - protein, 7 aa, synthetic construct
SASPHSK

SEQ ID NO: 4884 - protein, 7 aa, synthetic construct
SGSPHAK

SEQ ID NO: 4885 - protein, 7 aa, synthetic construct
HDSPHKI

SEQ ID NO: 4886 - protein, 7 aa, synthetic construct
YDSPHKS

SEQ ID NO: 4887 - protein, 7 aa, synthetic construct
HDSPHKT

SEQ ID NO: 4888 - protein, 7 aa, synthetic construct
RGSPHKR

SEQ ID NO: 4889 - protein, 7 aa, synthetic construct
HGSPHSK

SEQ ID NO: 4890 - protein, 7 aa, synthetic construct
RDSPHKS

SEQ ID NO: 4891 - protein, 7 aa, synthetic construct
NDSPHKS

SEQ ID NO: 4892 - protein, 7 aa, synthetic construct
QDSPHKI

SEQ ID NO: 4893 - protein, 7 aa, synthetic construct
PDSPHKI

SEQ ID NO: 4894 - protein, 7 aa, synthetic construct
PDSPHKS

SEQ ID NO: 4895 - protein, 7 aa, synthetic construct
MGSPHSK

SEQ ID NO: 4896 - protein, 7 aa, synthetic construct
HDSPHKH

SEQ ID NO: 4897 - protein, 7 aa, synthetic construct
QVSPHKS

SEQ ID NO: 4898 - protein, 7 aa, synthetic construct
HNSPHKS

SEQ ID NO: 4899 - protein, 7 aa, synthetic construct
NGSPHKR

SEQ ID NO: 4900 - protein, 7 aa, synthetic construct
HDSPHKY

SEQ ID NO: 4901 - protein, 7 aa, synthetic construct
NDSPHKI

SEQ ID NO: 4902 - protein, 7 aa, synthetic construct
HDSPHKL

SEQ ID NO: 4903 - protein, 7 aa, synthetic construct
HPSPHWK

SEQ ID NO: 4904 - protein, 7 aa, synthetic construct
HDSPHKM

SEQ ID NO: 4905 - protein, 7 aa, synthetic construct
HSSPHRS

SEQ ID NO: 4906 - protein, 9 aa, synthetic construct
GSGSPHARM

SEQ ID NO: 4907 - protein, 9 aa, synthetic construct
GSGSPHVKS

SEQ ID NO: 4908 - protein, 9 aa, synthetic construct
GQDSPHKSG

SEQ ID NO: 4909 - protein, 9 aa, synthetic construct
GSGSPHASR

SEQ ID NO: 4910 - protein, 9 aa, synthetic construct
GSGSPHVKI

SEQ ID NO: 4911 - protein, 9 aa, synthetic construct
GSGSPHKKN

SEQ ID NO: 4912 - protein, 9 aa, synthetic construct
GSGSPHVRM

SEQ ID NO: 4913 - protein, 9 aa, synthetic construct
VSGSPHSKA

SEQ ID NO: 4914 - protein, 9 aa, synthetic construct
CSGSPHSKA

SEQ ID NO: 4915 - protein, 9 aa, synthetic construct
GSGSPHRKA

SEQ ID NO: 4916 - protein, 9 aa, synthetic construct
CSGSPHKTS

SEQ ID NO: 4917 - protein, 9 aa, synthetic construct
CSHSPHKSG

SEQ ID NO: 4918 - protein, 9 aa, synthetic construct
GQSSPHRSG

SEQ ID NO: 4919 - protein, 9 aa, synthetic construct
GRGSPHASR

SEQ ID NO: 4920 - protein, 9 aa, synthetic construct
GRGSPHSKA

SEQ ID NO: 4921 - protein, 9 aa, synthetic construct
GSGSPHKFG

SEQ ID NO: 4922 - protein, 9 aa, synthetic construct
GSGSPHKIG

SEQ ID NO: 4923 - protein, 9 aa, synthetic construct
GSGSPHKLG

SEQ ID NO: 4924 - protein, 9 aa, synthetic construct
GSGSPHKTS

SEQ ID NO: 4925 - protein, 9 aa, synthetic construct
GSGSPHKTT

SEQ ID NO: 4926 - protein, 9 aa, synthetic construct
GSGSPHKTY

SEQ ID NO: 4927 - protein, 9 aa, synthetic construct
GSGSPHKYG

SEQ ID NO: 4928 - protein, 9 aa, synthetic construct
GSGSPHSKD

SEQ ID NO: 4929 - protein, 9 aa, synthetic construct
GSGSPHSKP

SEQ ID NO: 4930 - protein, 9 aa, synthetic construct
GSGSPHTRG

SEQ ID NO: 4931 - protein, 9 aa, synthetic construct
GSGSPHVRG

SEQ ID NO: 4932 - protein, 9 aa, synthetic construct
GSHSPHKRG

SEQ ID NO: 4933 - protein, 9 aa, synthetic construct
GSHSPHKSG

SEQ ID NO: 4934 - protein, 9 aa, synthetic construct
VSGSPHASR

SEQ ID NO: 4935 - protein, 9 aa, synthetic construct
VSGSPHGAR

SEQ ID NO: 4936 - protein, 9 aa, synthetic construct
VSGSPHKFG

SEQ ID NO: 4937 - protein, 9 aa, synthetic construct
GHDSPHKRG

SEQ ID NO: 4938 - protein, 9 aa, synthetic construct
GDDSPHKSG

SEQ ID NO: 4939 - protein, 9 aa, synthetic construct
GHESPHKSA

SEQ ID NO: 4940 - protein, 9 aa, synthetic construct
GHDSPHKSA

SEQ ID NO: 4941 - protein, 9 aa, synthetic construct
GNYSPHKIG

SEQ ID NO: 4942 - protein, 9 aa, synthetic construct
GHDSPHKSR

SEQ ID NO: 4943 - protein, 9 aa, synthetic construct
GSGSPHSKL

SEQ ID NO: 4944 - protein, 9 aa, synthetic construct
GSGSPHSRA

SEQ ID NO: 4945 - protein, 9 aa, synthetic construct
GSGSPHSKR

SEQ ID NO: 4946 - protein, 9 aa, synthetic construct
GSGSPHSLR

SEQ ID NO: 4947 - protein, 9 aa, synthetic construct
GSGSPHSRG

SEQ ID NO: 4948 - protein, 9 aa, synthetic construct
GSGSPHSSR

SEQ ID NO: 4949 - protein, 9 aa, synthetic construct
RVGSPHSKA

SEQ ID NO: 4950 - protein, 9 aa, synthetic construct
GSCSPHRKA

SEQ ID NO: 4951 - protein, 9 aa, synthetic construct
GSGSPHFLR

SEQ ID NO: 4952 - protein, 9 aa, synthetic construct
GSGSPHSKW

SEQ ID NO: 4953 - protein, 9 aa, synthetic construct
GSGSPHSKS

SEQ ID NO: 4954 - protein, 9 aa, synthetic construct
GLLSPHWKA

SEQ ID NO: 4955 - protein, 9 aa, synthetic construct
GSGSPHVRR

SEQ ID NO: 4956 - protein, 9 aa, synthetic construct
GSGSPHSKV

SEQ ID NO: 4957 - protein, 9 aa, synthetic construct
MSGSPHSKA

SEQ ID NO: 4958 - protein, 9 aa, synthetic construct
RNGSPHSKA

SEQ ID NO: 4959 - protein, 9 aa, synthetic construct
TSGSPHSKA

SEQ ID NO: 4960 - protein, 9 aa, synthetic construct
ISGSPHSKA

SEQ ID NO: 4961 - protein, 9 aa, synthetic construct
GPGSPHSKA

SEQ ID NO: 4962 - protein, 9 aa, synthetic construct
GSGSPHSKT

SEQ ID NO: 4963 - protein, 9 aa, synthetic construct
ESGSPHSKA

SEQ ID NO: 4964 - protein, 9 aa, synthetic construct
SSGSPHSKA

SEQ ID NO: 4965 - protein, 9 aa, synthetic construct
GNGSPHSKA

SEQ ID NO: 4966 - protein, 9 aa, synthetic construct
ASGSPHSKA

SEQ ID NO: 4967 - protein, 9 aa, synthetic construct
NSGSPHSKA

SEQ ID NO: 4968 - protein, 9 aa, synthetic construct
LSGSPHSKA

SEQ ID NO: 4969 - protein, 9 aa, synthetic construct
GGGSPHSKA

SEQ ID NO: 4970 - protein, 9 aa, synthetic construct
KSGSPHSKA

SEQ ID NO: 4971 - protein, 9 aa, synthetic construct
GGGSPHSKS

SEQ ID NO: 4972 - protein, 9 aa, synthetic construct
GSGSPHSKG

SEQ ID NO: 4973 - protein, 9 aa, synthetic construct
HSGSPHSKA

SEQ ID NO: 4974 - protein, 9 aa, synthetic construct
GTGSPHSKA

SEQ ID NO: 4975 - protein, 9 aa, synthetic construct
PSGSPHSKA

SEQ ID NO: 4976 - protein, 9 aa, synthetic construct
GSVSPHGKA

SEQ ID NO: 4977 - protein, 9 aa, synthetic construct
RSGSPHSKA

SEQ ID NO: 4978 - protein, 9 aa, synthetic construct
GSGSPHTKA

SEQ ID NO: 4979 - protein, 9 aa, synthetic construct
GIGSPHSKA

SEQ ID NO: 4980 - protein, 9 aa, synthetic construct
WSGSPHSKA

SEQ ID NO: 4981 - protein, 9 aa, synthetic construct
DSGSPHSKA

SEQ ID NO: 4982 - protein, 9 aa, synthetic construct
IDGSPHSKA

SEQ ID NO: 4983 - protein, 9 aa, synthetic construct
GSGSPHNKA

SEQ ID NO: 4984 - protein, 9 aa, synthetic construct
GLGSPHSKS

SEQ ID NO: 4985 - protein, 9 aa, synthetic construct
DAGSPHSKA

SEQ ID NO: 4986 - protein, 9 aa, synthetic construct
DGGSPHSKA

SEQ ID NO: 4987 - protein, 9 aa, synthetic construct
MEGSPHSKA

SEQ ID NO: 4988 - protein, 9 aa, synthetic construct
ENGSPHSKA

SEQ ID NO: 4989 - protein, 9 aa, synthetic construct
GSASPHSKA

SEQ ID NO: 4990 - protein, 9 aa, synthetic construct
GNGSPHSKS

SEQ ID NO: 4991 - protein, 9 aa, synthetic construct
KNGSPHSKA

SEQ ID NO: 4992 - protein, 9 aa, synthetic construct
KEGSPHSKA

SEQ ID NO: 4993 - protein, 9 aa, synthetic construct
AIGSPHSKA

SEQ ID NO: 4994 - protein, 9 aa, synthetic construct
GSGSPHSKN

SEQ ID NO: 4995 - protein, 9 aa, synthetic construct
GSGSPHAKA

SEQ ID NO: 4996 - protein, 9 aa, synthetic construct
GHDSPHKIG

SEQ ID NO: 4997 - protein, 9 aa, synthetic construct
GYDSPHKSG

SEQ ID NO: 4998 - protein, 9 aa, synthetic construct
GHESPHKSG

SEQ ID NO: 4999 - protein, 9 aa, synthetic construct
GHDSPHKTG

SEQ ID NO: 5000 - protein, 9 aa, synthetic construct
GRGSPHKRG

SEQ ID NO: 5001 - protein, 9 aa, synthetic construct
GHDSPHKSL

SEQ ID NO: 5002 - protein, 9 aa, synthetic construct
GHGSPHSKA

SEQ ID NO: 5003 - protein, 9 aa, synthetic construct
GHDSPHKSE

SEQ ID NO: 5004 - protein, 9 aa, synthetic construct
GRDSPHKSG

SEQ ID NO: 5005 - protein, 9 aa, synthetic construct
GNDSPHKSV

SEQ ID NO: 5006 - protein, 9 aa, synthetic construct
GQDSPHKIG

SEQ ID NO: 5007 - protein, 9 aa, synthetic construct
GHDSPHKSV

SEQ ID NO: 5008 - protein, 9 aa, synthetic construct
GPDSPHKIG

SEQ ID NO: 5009 - protein, 9 aa, synthetic construct
GPDSPHKSG

SEQ ID NO: 5010 - protein, 9 aa, synthetic construct
GHDSPHKSW

SEQ ID NO: 5011 - protein, 9 aa, synthetic construct
GHDSPHKSN

SEQ ID NO: 5012 - protein, 9 aa, synthetic construct
GMGSPHSKT

SEQ ID NO: 5013 - protein, 9 aa, synthetic construct
GHDSPHKHG

SEQ ID NO: 5014 - protein, 9 aa, synthetic construct
GQVSPHKSG

SEQ ID NO: 5015 - protein, 9 aa, synthetic construct
GDDSPHKSV

SEQ ID NO: 5016 - protein, 9 aa, synthetic construct
GHNSPHKSG

SEQ ID NO: 5017 - protein, 9 aa, synthetic construct
GNGSPHKRG

SEQ ID NO: 5018 - protein, 9 aa, synthetic construct
GHDSPHKYG

SEQ ID NO: 5019 - protein, 9 aa, synthetic construct
GHDSPHKSQ

SEQ ID NO: 5020 - protein, 9 aa, synthetic construct
GNDSPHKIG

SEQ ID NO: 5021 - protein, 9 aa, synthetic construct
GHDSPHKSK

SEQ ID NO: 5022 - protein, 9 aa, synthetic construct
GHDSPHKLW

SEQ ID NO: 5023 - protein, 9 aa, synthetic construct
GHPSPHWKG

SEQ ID NO: 5024 - protein, 9 aa, synthetic construct
GHDSPHKMG

SEQ ID NO: 5025 - protein, 9 aa, synthetic construct
GHDSPHKMA

SEQ ID NO: 5026 - protein, 9 aa, synthetic construct
GHSSPHRSG

SEQ ID NO: 5027 - protein, 8 aa, synthetic construct
SGSPHKYG

SEQ ID NO: 5028 - protein, 4 aa, synthetic construct
QNQQ

SEQ ID NO: 5029 - protein, 4 aa, synthetic construct
WNQQ

SEQ ID NO: 5030 - protein, 4 aa, synthetic construct
QYYV

SEQ ID NO: 5031 - protein, 4 aa, synthetic construct
RRQQ

SEQ ID NO: 5032 - protein, 4 aa, synthetic construct
GCGQ

SEQ ID NO: 5033 - protein, 4 aa, synthetic construct
LRQQ

SEQ ID NO: 5034 - protein, 4 aa, synthetic construct
RNQQ

SEQ ID NO: 5035 - protein, 4 aa, synthetic construct
VNQQ

SEQ ID NO: 5036 - protein, 4 aa, synthetic construct
FRLQ

SEQ ID NO: 5037 - protein, 4 aa, synthetic construct
FNQQ

SEQ ID NO: 5038 - protein, 4 aa, synthetic construct
LLQQ

SEQ ID NO: 5039 - protein, 4 aa, synthetic construct
SNQQ

SEQ ID NO: 5040 - protein, 4 aa, synthetic construct
RLQQ

SEQ ID NO: 5041 - protein, 4 aa, synthetic construct
LNQQ

SEQ ID NO: 5042 - protein, 4 aa, synthetic construct
QRKL

SEQ ID NO: 5043 - protein, 4 aa, synthetic construct
LRRQ

SEQ ID NO: 5044 - protein, 4 aa, synthetic construct
QRLR

SEQ ID NO: 5045 - protein, 4 aa, synthetic construct
QRRL

SEQ ID NO: 5046 - protein, 4 aa, synthetic construct
RRLQ

SEQ ID NO: 5047 - protein, 4 aa, synthetic construct
RLRQ

SEQ ID NO: 5048 - protein, 4 aa, synthetic construct
SKRQ

SEQ ID NO: 5049 - protein, 4 aa, synthetic construct
QLYR

SEQ ID NO: 5050 - protein, 4 aa, synthetic construct
QLTV

SEQ ID NO: 5051 - protein, 4 aa, synthetic construct
QNKQ

SEQ ID NO: 5052 - protein, 4 aa, synthetic construct
KNQQ

SEQ ID NO: 5053 - protein, 4 aa, synthetic construct
QKQQ

SEQ ID NO: 5054 - protein, 4 aa, synthetic construct
QTQQ

SEQ ID NO: 5055 - protein, 4 aa, synthetic construct
QNHQ

SEQ ID NO: 5056 - protein, 4 aa, synthetic construct
QHQQ

SEQ ID NO: 5057 - protein, 4 aa, synthetic construct
QNQH

SEQ ID NO: 5058 - protein, 4 aa, synthetic construct
QHRQ

SEQ ID NO: 5059 - protein, 4 aa, synthetic construct
LTQQ

SEQ ID NO: 5060 - protein, 4 aa, synthetic construct
QNQW

SEQ ID NO: 5061 - protein, 4 aa, synthetic construct
QNTH

SEQ ID NO: 5062 - protein, 4 aa, synthetic construct
RRRQ

SEQ ID NO: 5063 - protein, 4 aa, synthetic construct
QYQQ

SEQ ID NO: 5064 - protein, 4 aa, synthetic construct
QNDQ

SEQ ID NO: 5065 - protein, 4 aa, synthetic construct
QNRH

SEQ ID NO: 5066 - protein, 4 aa, synthetic construct
RDQQ

SEQ ID NO: 5067 - protein, 4 aa, synthetic construct
PNLQ

SEQ ID NO: 5068 - protein, 4 aa, synthetic construct
HVRQ

SEQ ID NO: 5069 - protein, 4 aa, synthetic construct
PNQH

SEQ ID NO: 5070 - protein, 4 aa, synthetic construct
HNQQ

SEQ ID NO: 5071 - protein, 4 aa, synthetic construct
QSQQ

SEQ ID NO: 5072 - protein, 4 aa, synthetic construct
QPAK

SEQ ID NO: 5073 - protein, 4 aa, synthetic construct
QNLA

SEQ ID NO: 5074 - protein, 4 aa, synthetic construct
QNQL

SEQ ID NO: 5075 - protein, 4 aa, synthetic construct
QGQQ

SEQ ID NO: 5076 - protein, 4 aa, synthetic construct
LNRQ

SEQ ID NO: 5077 - protein, 4 aa, synthetic construct
QNPP

SEQ ID NO: 5078 - protein, 4 aa, synthetic construct
QNLQ

SEQ ID NO: 5079 - protein, 4 aa, synthetic construct
QDQE

SEQ ID NO: 5080 - protein, 4 aa, synthetic construct
QDQQ

SEQ ID NO: 5081 - protein, 4 aa, synthetic construct
HWQQ

SEQ ID NO: 5082 - protein, 4 aa, synthetic construct
PNQQ

SEQ ID NO: 5083 - protein, 4 aa, synthetic construct
PEQQ

SEQ ID NO: 5084 - protein, 4 aa, synthetic construct
QRTM

SEQ ID NO: 5085 - protein, 4 aa, synthetic construct
LHQH

SEQ ID NO: 5086 - protein, 4 aa, synthetic construct
QHRI

SEQ ID NO: 5087 - protein, 4 aa, synthetic construct
QYIH

SEQ ID NO: 5088 - protein, 4 aa, synthetic construct
QKFE

SEQ ID NO: 5089 - protein, 4 aa, synthetic construct
QFPS

SEQ ID NO: 5090 - protein, 4 aa, synthetic construct
QNPL

SEQ ID NO: 5091 - protein, 4 aa, synthetic construct
QAIK

SEQ ID NO: 5092 - protein, 4 aa, synthetic construct
QNRQ

SEQ ID NO: 5093 - protein, 4 aa, synthetic construct
QYQH

SEQ ID NO: 5094 - protein, 4 aa, synthetic construct
QNPQ

SEQ ID NO: 5095 - protein, 4 aa, synthetic construct
QHQL

SEQ ID NO: 5096 - protein, 4 aa, synthetic construct
QSPP

SEQ ID NO: 5097 - protein, 4 aa, synthetic construct
QAKL

SEQ ID NO: 5098 - protein, 4 aa, synthetic construct
KSQQ

SEQ ID NO: 5099 - protein, 4 aa, synthetic construct
QDRP

SEQ ID NO: 5100 - protein, 4 aa, synthetic construct
QNLG

SEQ ID NO: 5101 - protein, 4 aa, synthetic construct
QAFH

SEQ ID NO: 5102 - protein, 4 aa, synthetic construct
QNAQ

SEQ ID NO: 5103 - protein, 4 aa, synthetic construct
HNQL

SEQ ID NO: 5104 - protein, 4 aa, synthetic construct
QKLN

SEQ ID NO: 5105 - protein, 4 aa, synthetic construct
QNVQ

SEQ ID NO: 5106 - protein, 4 aa, synthetic construct
QAQQ

SEQ ID NO: 5107 - protein, 4 aa, synthetic construct
QTPP

SEQ ID NO: 5108 - protein, 4 aa, synthetic construct
QPPA

SEQ ID NO: 5109 - protein, 4 aa, synthetic construct
QERP

SEQ ID NO: 5110 - protein, 4 aa, synthetic construct
QDLQ

SEQ ID NO: 5111 - protein, 4 aa, synthetic construct
QAMH

SEQ ID NO: 5112 - protein, 4 aa, synthetic construct
QHPS

SEQ ID NO: 5113 - protein, 4 aa, synthetic construct
PGLQ

SEQ ID NO: 5114 - protein, 4 aa, synthetic construct
QGIR

SEQ ID NO: 5115 - protein, 4 aa, synthetic construct
QAPA

SEQ ID NO: 5116 - protein, 4 aa, synthetic construct
QIPP

SEQ ID NO: 5117 - protein, 4 aa, synthetic construct
QTQL

SEQ ID NO: 5118 - protein, 4 aa, synthetic construct
QAPS

SEQ ID NO: 5119 - protein, 4 aa, synthetic construct
QNTY

SEQ ID NO: 5120 - protein, 4 aa, synthetic construct
QDKQ

SEQ ID NO: 5121 - protein, 4 aa, synthetic construct
QNHL

SEQ ID NO: 5122 - protein, 4 aa, synthetic construct
QIGM

SEQ ID NO: 5123 - protein, 4 aa, synthetic construct
LNKQ

SEQ ID NO: 5124 - protein, 4 aa, synthetic construct
PNQL

SEQ ID NO: 5125 - protein, 4 aa, synthetic construct
QLQQ

SEQ ID NO: 5126 - protein, 4 aa, synthetic construct
QRMS

SEQ ID NO: 5127 - protein, 4 aa, synthetic construct
QGIL

SEQ ID NO: 5128 - protein, 4 aa, synthetic construct
QDRQ

SEQ ID NO: 5129 - protein, 4 aa, synthetic construct
RDWQ

SEQ ID NO: 5130 - protein, 4 aa, synthetic construct
QERS

SEQ ID NO: 5131 - protein, 4 aa, synthetic construct
QNYQ

SEQ ID NO: 5132 - protein, 4 aa, synthetic construct
QRTC

SEQ ID NO: 5133 - protein, 4 aa, synthetic construct
QIGH

SEQ ID NO: 5134 - protein, 4 aa, synthetic construct
QGAI

SEQ ID NO: 5135 - protein, 4 aa, synthetic construct
QVPP

SEQ ID NO: 5136 - protein, 4 aa, synthetic construct
QVQQ

SEQ ID NO: 5137 - protein, 4 aa, synthetic construct
LMRQ

SEQ ID NO: 5138 - protein, 4 aa, synthetic construct
QYSV

SEQ ID NO: 5139 - protein, 4 aa, synthetic construct
QAIT

SEQ ID NO: 5140 - protein, 4 aa, synthetic construct
QKTL

SEQ ID NO: 5141 - protein, 4 aa, synthetic construct
QLHH

SEQ ID NO: 5142 - protein, 4 aa, synthetic construct
QNII

SEQ ID NO: 5143 - protein, 4 aa, synthetic construct
QGHH

SEQ ID NO: 5144 - protein, 4 aa, synthetic construct
QSKV

SEQ ID NO: 5145 - protein, 4 aa, synthetic construct
QLPS

SEQ ID NO: 5146 - protein, 4 aa, synthetic construct
IGKQ

SEQ ID NO: 5147 - protein, 4 aa, synthetic construct
QAIH

SEQ ID NO: 5148 - protein, 4 aa, synthetic construct
QHGL

SEQ ID NO: 5149 - protein, 4 aa, synthetic construct
QFMC

SEQ ID NO: 5150 - protein, 4 aa, synthetic construct
QNQM

SEQ ID NO: 5151 - protein, 4 aa, synthetic construct
QHLQ

SEQ ID NO: 5152 - protein, 4 aa, synthetic construct
QPAR

SEQ ID NO: 5153 - protein, 4 aa, synthetic construct
QSLQ

SEQ ID NO: 5154 - protein, 4 aa, synthetic construct
QSQL

SEQ ID NO: 5155 - protein, 4 aa, synthetic construct
HSQQ

SEQ ID NO: 5156 - protein, 4 aa, synthetic construct
QMPS

SEQ ID NO: 5157 - protein, 4 aa, synthetic construct
QGSL

SEQ ID NO: 5158 - protein, 4 aa, synthetic construct
QVPA

SEQ ID NO: 5159 - protein, 4 aa, synthetic construct
HYQQ

SEQ ID NO: 5160 - protein, 4 aa, synthetic construct
QVPS

SEQ ID NO: 5161 - protein, 4 aa, synthetic construct
RGEQ

SEQ ID NO: 5162 - protein, 4 aa, synthetic construct
PGQQ

SEQ ID NO: 5163 - protein, 4 aa, synthetic construct
LEQQ

SEQ ID NO: 5164 - protein, 4 aa, synthetic construct
QNQS

SEQ ID NO: 5165 - protein, 4 aa, synthetic construct
QKVI

SEQ ID NO: 5166 - protein, 4 aa, synthetic construct
QNND

SEQ ID NO: 5167 - protein, 4 aa, synthetic construct
QSVH

SEQ ID NO: 5168 - protein, 4 aa, synthetic construct
QPLG

SEQ ID NO: 5169 - protein, 4 aa, synthetic construct
HNQE

SEQ ID NO: 5170 - protein, 4 aa, synthetic construct
QIQQ

SEQ ID NO: 5171 - protein, 4 aa, synthetic construct
QVRN

SEQ ID NO: 5172 - protein, 4 aa, synthetic construct
PSNQ

SEQ ID NO: 5173 - protein, 4 aa, synthetic construct
QVGH

SEQ ID NO: 5174 - protein, 4 aa, synthetic construct
QRDI

SEQ ID NO: 5175 - protein, 4 aa, synthetic construct
QMPN

SEQ ID NO: 5176 - protein, 4 aa, synthetic construct
RGLQ

SEQ ID NO: 5177 - protein, 4 aa, synthetic construct
PSLQ

SEQ ID NO: 5178 - protein, 4 aa, synthetic construct
QRDQ

SEQ ID NO: 5179 - protein, 4 aa, synthetic construct
QAKG

SEQ ID NO: 5180 - protein, 4 aa, synthetic construct
QSAH

SEQ ID NO: 5181 - protein, 4 aa, synthetic construct
QSTM

SEQ ID NO: 5182 - protein, 4 aa, synthetic construct
QREM

SEQ ID NO: 5183 - protein, 4 aa, synthetic construct
QYRA

SEQ ID NO: 5184 - protein, 4 aa, synthetic construct
QRQQ

SEQ ID NO: 5185 - protein, 4 aa, synthetic construct
QWQQ

SEQ ID NO: 5186 - protein, 4 aa, synthetic construct
QRMN

SEQ ID NO: 5187 - protein, 4 aa, synthetic construct
GDSQ

SEQ ID NO: 5188 - protein, 4 aa, synthetic construct
QKIS

SEQ ID NO: 5189 - protein, 4 aa, synthetic construct
PSMQ

SEQ ID NO: 5190 - protein, 4 aa, synthetic construct
SPRQ

SEQ ID NO: 5191 - protein, 4 aa, synthetic construct
MEQQ

SEQ ID NO: 5192 - protein, 4 aa, synthetic construct
QYQN

SEQ ID NO: 5193 - protein, 4 aa, synthetic construct
QIRQ

SEQ ID NO: 5194 - protein, 4 aa, synthetic construct
QSVQ

SEQ ID NO: 5195 - protein, 4 aa, synthetic construct
RSQQ

SEQ ID NO: 5196 - protein, 4 aa, synthetic construct
QNKL

SEQ ID NO: 5197 - protein, 4 aa, synthetic construct
QIQH

SEQ ID NO: 5198 - protein, 4 aa, synthetic construct
PRQQ

SEQ ID NO: 5199 - protein, 4 aa, synthetic construct
HTQQ

SEQ ID NO: 5200 - protein, 4 aa, synthetic construct
QRQH

SEQ ID NO: 5201 - protein, 4 aa, synthetic construct
RNQE

SEQ ID NO: 5202 - protein, 4 aa, synthetic construct
QSKQ

SEQ ID NO: 5203 - protein, 4 aa, synthetic construct
QNQP

SEQ ID NO: 5204 - protein, 4 aa, synthetic construct
QSPQ

SEQ ID NO: 5205 - protein, 4 aa, synthetic construct
QTRQ

SEQ ID NO: 5206 - protein, 4 aa, synthetic construct
QNLH

SEQ ID NO: 5207 - protein, 4 aa, synthetic construct
QNQE

SEQ ID NO: 5208 - protein, 4 aa, synthetic construct
LNQP

SEQ ID NO: 5209 - protein, 4 aa, synthetic construct
QNQD

SEQ ID NO: 5210 - protein, 4 aa, synthetic construct
QNLL

SEQ ID NO: 5211 - protein, 4 aa, synthetic construct
QLVI

SEQ ID NO: 5212 - protein, 4 aa, synthetic construct
RTQE

SEQ ID NO: 5213 - protein, 4 aa, synthetic construct
QTHQ

SEQ ID NO: 5214 - protein, 4 aa, synthetic construct
QDQH

SEQ ID NO: 5215 - protein, 4 aa, synthetic construct
QSQH

SEQ ID NO: 5216 - protein, 4 aa, synthetic construct
VRQQ

SEQ ID NO: 5217 - protein, 4 aa, synthetic construct
AWQQ

SEQ ID NO: 5218 - protein, 4 aa, synthetic construct
QSVP

SEQ ID NO: 5219 - protein, 4 aa, synthetic construct
QNIQ

SEQ ID NO: 5220 - protein, 4 aa, synthetic construct
LDQQ

SEQ ID NO: 5221 - protein, 4 aa, synthetic construct
PDQQ

SEQ ID NO: 5222 - protein, 4 aa, synthetic construct
ESQQ

SEQ ID NO: 5223 - protein, 4 aa, synthetic construct
QRQL

SEQ ID NO: 5224 - protein, 4 aa, synthetic construct
QIIV

SEQ ID NO: 5225 - protein, 4 aa, synthetic construct
QKQS

SEQ ID NO: 5226 - protein, 4 aa, synthetic construct
QSHQ

SEQ ID NO: 5227 - protein, 4 aa, synthetic construct
QFVV

SEQ ID NO: 5228 - protein, 4 aa, synthetic construct
QSQP

SEQ ID NO: 5229 - protein, 4 aa, synthetic construct
QNEQ

SEQ ID NO: 5230 - protein, 4 aa, synthetic construct
INQQ

SEQ ID NO: 5231 - protein, 4 aa, synthetic construct
RNRQ

SEQ ID NO: 5232 - protein, 4 aa, synthetic construct
RDQK

SEQ ID NO: 5233 - protein, 4 aa, synthetic construct
QWKR

SEQ ID NO: 5234 - protein, 4 aa, synthetic construct
ENRQ

SEQ ID NO: 5235 - protein, 4 aa, synthetic construct
QTQP

SEQ ID NO: 5236 - protein, 4 aa, synthetic construct
QKQL

SEQ ID NO: 5237 - protein, 4 aa, synthetic construct
RNQL

SEQ ID NO: 5238 - protein, 4 aa, synthetic construct
ISIQ

SEQ ID NO: 5239 - protein, 4 aa, synthetic construct
QTVC

SEQ ID NO: 5240 - protein, 4 aa, synthetic construct
QQIM

SEQ ID NO: 5241 - protein, 4 aa, synthetic construct
LNHQ

SEQ ID NO: 5242 - protein, 4 aa, synthetic construct
QNQA

SEQ ID NO: 5243 - protein, 4 aa, synthetic construct
QMIH

SEQ ID NO: 5244 - protein, 4 aa, synthetic construct
RNHQ

SEQ ID NO: 5245 - protein, 4 aa, synthetic construct
QKMN

SEQ ID NO: 5246 - protein, 17 aa, synthetic construct
TINGSGSPHKYGQNQQT

SEQ ID NO: 5247 - protein, 7 aa, synthetic construct
SLLWNQQ

SEQ ID NO: 5248 - protein, 7 aa, synthetic construct
SKAQYYV

SEQ ID NO: 5249 - protein, 7 aa, synthetic construct
SKLRRQQ

SEQ ID NO: 5250 - protein, 7 aa, synthetic construct
SIWQNQQ

SEQ ID NO: 5251 - protein, 7 aa, synthetic construct
SKAGCGQ

SEQ ID NO: 5252 - protein, 7 aa, synthetic construct
SRAQNQQ

SEQ ID NO: 5253 - protein, 7 aa, synthetic construct
SKRLRQQ

SEQ ID NO: 5254 - protein, 7 aa, synthetic construct
SLRRNQQ

SEQ ID NO: 5255 - protein, 7 aa, synthetic construct
SRGRNQQ

SEQ ID NO: 5256 - protein, 7 aa, synthetic construct
SEIVNQQ

SEQ ID NO: 5257 - protein, 7 aa, synthetic construct
SSRRNQQ

SEQ ID NO: 5258 - protein, 7 aa, synthetic construct
CLLQNQQ

SEQ ID NO: 5259 - protein, 7 aa, synthetic construct
SKAFRLQ

SEQ ID NO: 5260 - protein, 7 aa, synthetic construct
CLAQNQQ

SEQ ID NO: 5261 - protein, 7 aa, synthetic construct
FLRQNQQ

SEQ ID NO: 5262 - protein, 7 aa, synthetic construct
SLRFNQQ

SEQ ID NO: 5263 - protein, 7 aa, synthetic construct
SYLRNQQ

SEQ ID NO: 5264 - protein, 7 aa, synthetic construct
CSLQNQQ

SEQ ID NO: 5265 - protein, 7 aa, synthetic construct
VLWQNQQ

SEQ ID NO: 5266 - protein, 7 aa, synthetic construct
SKWLLQQ

SEQ ID NO: 5267 - protein, 7 aa, synthetic construct
SLWSNQQ

SEQ ID NO: 5268 - protein, 7 aa, synthetic construct
SKRRLQQ

SEQ ID NO: 5269 - protein, 7 aa, synthetic construct
SVYLNQQ

SEQ ID NO: 5270 - protein, 7 aa, synthetic construct
SLWLNQQ

SEQ ID NO: 5271 - protein, 7 aa, synthetic construct
SKAQRKL

SEQ ID NO: 5272 - protein, 7 aa, synthetic construct
SKALRRQ

SEQ ID NO: 5273 - protein, 7 aa, synthetic construct
SKAQRLR

SEQ ID NO: 5274 - protein, 7 aa, synthetic construct
SKAQNQQ

SEQ ID NO: 5275 - protein, 7 aa, synthetic construct
SKAQRRL

SEQ ID NO: 5276 - protein, 7 aa, synthetic construct
SKARRQQ

SEQ ID NO: 5277 - protein, 7 aa, synthetic construct
SKARRLQ

SEQ ID NO: 5278 - protein, 7 aa, synthetic construct
SKSRRQQ

SEQ ID NO: 5279 - protein, 7 aa, synthetic construct
SKARLRQ

SEQ ID NO: 5280 - protein, 7 aa, synthetic construct
SKASKRQ

SEQ ID NO: 5281 - protein, 7 aa, synthetic construct
VRRQNQQ

SEQ ID NO: 5282 - protein, 7 aa, synthetic construct
SKAQLYR

SEQ ID NO: 5283 - protein, 7 aa, synthetic construct
SLFRNQQ

SEQ ID NO: 5284 - protein, 7 aa, synthetic construct
SKAQLTV

SEQ ID NO: 5285 - protein, 13 aa, synthetic construct
GSGSPHSLLWNQQ

SEQ ID NO: 5286 - protein, 13 aa, synthetic construct
GSGSPHSIWQNQQ

SEQ ID NO: 5287 - protein, 13 aa, synthetic construct
GSGSPHSEIVNQQ

SEQ ID NO: 5288 - protein, 13 aa, synthetic construct
GSGSPHCLLQNQQ

SEQ ID NO: 5289 - protein, 13 aa, synthetic construct
GSGSPHCLAQNQQ

SEQ ID NO: 5290 - protein, 13 aa, synthetic construct
GSGSPHSYLRNQQ

SEQ ID NO: 5291 - protein, 13 aa, synthetic construct
GSGSPHCSLQNQQ

SEQ ID NO: 5292 - protein, 13 aa, synthetic construct
GSGSPHVLWQNQQ

SEQ ID NO: 5293 - protein, 13 aa, synthetic construct
GSGSPHSLWSNQQ

SEQ ID NO: 5294 - protein, 13 aa, synthetic construct
GSGSPHSVYLNQQ

SEQ ID NO: 5295 - protein, 13 aa, synthetic construct
GSGSPHSLWLNQQ

SEQ ID NO: 5296 - protein, 13 aa, synthetic construct
GSGSPHSLFRNQQ

SEQ ID NO: 5297 - protein, 6 aa, synthetic construct
TINGHD

SEQ ID NO: 5298 - protein, 6 aa, synthetic construct
MPEGHD

SEQ ID NO: 5299 - protein, 6 aa, synthetic construct
MEGGHD

SEQ ID NO: 5300 - protein, 6 aa, synthetic construct
MEYGHD

SEQ ID NO: 5301 - protein, 6 aa, synthetic construct
AEWGHD

SEQ ID NO: 5302 - protein, 6 aa, synthetic construct
CEWGHD

SEQ ID NO: 5303 - protein, 6 aa, synthetic construct
ANNGQD

SEQ ID NO: 5304 - protein, 6 aa, synthetic construct
IPEGHD

SEQ ID NO: 5305 - protein, 6 aa, synthetic construct
ADMGHD

SEQ ID NO: 5306 - protein, 6 aa, synthetic construct
IEYGHD

SEQ ID NO: 5307 - protein, 6 aa, synthetic construct
ADYGHD

SEQ ID NO: 5308 - protein, 6 aa, synthetic construct
IETGHD

SEQ ID NO: 5309 - protein, 6 aa, synthetic construct
MEWGHD

SEQ ID NO: 5310 - protein, 6 aa, synthetic construct
CEYGHD

SEQ ID NO: 5311 - protein, 6 aa, synthetic construct
RINGHD

SEQ ID NO: 5312 - protein, 6 aa, synthetic construct
MEIGHD

SEQ ID NO: 5313 - protein, 6 aa, synthetic construct
LEYGHD

SEQ ID NO: 5314 - protein, 6 aa, synthetic construct
ADWGHD

SEQ ID NO: 5315 - protein, 6 aa, synthetic construct
IEIGHD

SEQ ID NO: 5316 - protein, 6 aa, synthetic construct
TIKDND

SEQ ID NO: 5317 - protein, 6 aa, synthetic construct
DIMGHD

SEQ ID NO: 5318 - protein, 6 aa, synthetic construct
FEQGHD

SEQ ID NO: 5319 - protein, 6 aa, synthetic construct
MEFGHD

SEQ ID NO: 5320 - protein, 6 aa, synthetic construct
CDQGHD

SEQ ID NO: 5321 - protein, 6 aa, synthetic construct
LPEGHD

SEQ ID NO: 5322 - protein, 6 aa, synthetic construct
IENGHD

SEQ ID NO: 5323 - protein, 6 aa, synthetic construct
MESGHD

SEQ ID NO: 5324 - protein, 6 aa, synthetic construct
AEIGHD

SEQ ID NO: 5325 - protein, 6 aa, synthetic construct
VEYGHD

SEQ ID NO: 5326 - protein, 6 aa, synthetic construct
TSNGDD

SEQ ID NO: 5327 - protein, 6 aa, synthetic construct
IEVGHD

SEQ ID NO: 5328 - protein, 6 aa, synthetic construct
MEMGHD

SEQ ID NO: 5329 - protein, 6 aa, synthetic construct
AEVGHD

SEQ ID NO: 5330 - protein, 6 aa, synthetic construct
MDAGHD

SEQ ID NO: 5331 - protein, 6 aa, synthetic construct
VEWGHD

SEQ ID NO: 5332 - protein, 6 aa, synthetic construct
AEQGHD

SEQ ID NO: 5333 - protein, 6 aa, synthetic construct
LEWGHD

SEQ ID NO: 5334 - protein, 6 aa, synthetic construct
MELGHD

SEQ ID NO: 5335 - protein, 6 aa, synthetic construct
METGHD

SEQ ID NO: 5336 - protein, 6 aa, synthetic construct
MEAGHD

SEQ ID NO: 5337 - protein, 6 aa, synthetic construct
TINRQR

SEQ ID NO: 5338 - protein, 6 aa, synthetic construct
IESGHD

SEQ ID NO: 5339 - protein, 6 aa, synthetic construct
TAKDHD

SEQ ID NO: 5340 - protein, 6 aa, synthetic construct
MEVGHD

SEQ ID NO: 5341 - protein, 6 aa, synthetic construct
CEIGHD

SEQ ID NO: 5342 - protein, 6 aa, synthetic construct
ATNGHD

SEQ ID NO: 5343 - protein, 6 aa, synthetic construct
MDGGHD

SEQ ID NO: 5344 - protein, 6 aa, synthetic construct
QEVGHD

SEQ ID NO: 5345 - protein, 6 aa, synthetic construct
ADQGHD

SEQ ID NO: 5346 - protein, 6 aa, synthetic construct
NMNGHD

SEQ ID NO: 5347 - protein, 6 aa, synthetic construct
TPWEHD

SEQ ID NO: 5348 - protein, 6 aa, synthetic construct
IEMGHD

SEQ ID NO: 5349 - protein, 6 aa, synthetic construct
TANEHD

SEQ ID NO: 5350 - protein, 6 aa, synthetic construct
QQQGHD

SEQ ID NO: 5351 - protein, 6 aa, synthetic construct
TPQDHD

SEQ ID NO: 5352 - protein, 6 aa, synthetic construct
HDWGHD

SEQ ID NO: 5353 - protein, 6 aa, synthetic construct
IEGGHD

SEQ ID NO: 5354 - protein, 11 aa, synthetic construct
TINGHDSPHKR

SEQ ID NO: 5355 - protein, 11 aa, synthetic construct
MPEGHDSPHKS

SEQ ID NO: 5356 - protein, 11 aa, synthetic construct
MEGGHDSPHKS

SEQ ID NO: 5357 - protein, 11 aa, synthetic construct
MEYGHDSPHKS

SEQ ID NO: 5358 - protein, 11 aa, synthetic construct
AEWGHDSPHKS

SEQ ID NO: 5359 - protein, 11 aa, synthetic construct
CEWGHDSPHKS

SEQ ID NO: 5360 - protein, 11 aa, synthetic construct
ANNGQDSPHKS

SEQ ID NO: 5361 - protein, 11 aa, synthetic construct
IPEGHDSPHKS

SEQ ID NO: 5362 - protein, 11 aa, synthetic construct
ADMGHDSPHKS

SEQ ID NO: 5363 - protein, 11 aa, synthetic construct
IEYGHDSPHKS

SEQ ID NO: 5364 - protein, 11 aa, synthetic construct
ADYGHDSPHKS

SEQ ID NO: 5365 - protein, 11 aa, synthetic construct
IETGHDSPHKS

SEQ ID NO: 5366 - protein, 11 aa, synthetic construct
MEWGHDSPHKS

SEQ ID NO: 5367 - protein, 11 aa, synthetic construct
CEYGHDSPHKS

SEQ ID NO: 5368 - protein, 11 aa, synthetic construct
RINGHDSPHKS

SEQ ID NO: 5369 - protein, 11 aa, synthetic construct
MEIGHDSPHKS

SEQ ID NO: 5370 - protein, 11 aa, synthetic construct
LEYGHDSPHKS

SEQ ID NO: 5371 - protein, 11 aa, synthetic construct
ADWGHDSPHKS

SEQ ID NO: 5372 - protein, 11 aa, synthetic construct
IEIGHDSPHKS

SEQ ID NO: 5373 - protein, 11 aa, synthetic construct
TIKDNDSPHKS

SEQ ID NO: 5374 - protein, 11 aa, synthetic construct
DIMGHDSPHKS

SEQ ID NO: 5375 - protein, 11 aa, synthetic construct
FEQGHDSPHKS

SEQ ID NO: 5376 - protein, 11 aa, synthetic construct
MEFGHDSPHKS

SEQ ID NO: 5377 - protein, 11 aa, synthetic construct
CDQGHDSPHKS

SEQ ID NO: 5378 - protein, 11 aa, synthetic construct
LPEGHDSPHKS

SEQ ID NO: 5379 - protein, 11 aa, synthetic construct
IENGHDSPHKS

SEQ ID NO: 5380 - protein, 11 aa, synthetic construct
MESGHDSPHKS

SEQ ID NO: 5381 - protein, 11 aa, synthetic construct
AEIGHDSPHKS

SEQ ID NO: 5382 - protein, 11 aa, synthetic construct
VEYGHDSPHKS

SEQ ID NO: 5383 - protein, 11 aa, synthetic construct
TSNGDDSPHKS

SEQ ID NO: 5384 - protein, 11 aa, synthetic construct
IEVGHDSPHKS

SEQ ID NO: 5385 - protein, 11 aa, synthetic construct
MEMGHDSPHKS

SEQ ID NO: 5386 - protein, 11 aa, synthetic construct
AEVGHDSPHKS

SEQ ID NO: 5387 - protein, 11 aa, synthetic construct
MDAGHDSPHKS

SEQ ID NO: 5388 - protein, 11 aa, synthetic construct
VEWGHDSPHKS

SEQ ID NO: 5389 - protein, 11 aa, synthetic construct
AEQGHDSPHKS

SEQ ID NO: 5390 - protein, 11 aa, synthetic construct
LEWGHDSPHKS

SEQ ID NO: 5391 - protein, 11 aa, synthetic construct
MELGHDSPHKS

SEQ ID NO: 5392 - protein, 11 aa, synthetic construct
METGHDSPHKS

SEQ ID NO: 5393 - protein, 11 aa, synthetic construct
MEAGHDSPHKS

SEQ ID NO: 5394 - protein, 11 aa, synthetic construct
TINRQRSPHKS

SEQ ID NO: 5395 - protein, 11 aa, synthetic construct
IESGHDSPHKS

SEQ ID NO: 5396 - protein, 11 aa, synthetic construct
TAKDHDSPHKS

SEQ ID NO: 5397 - protein, 11 aa, synthetic construct
MEVGHDSPHKS

SEQ ID NO: 5398 - protein, 11 aa, synthetic construct
CEIGHDSPHKS

SEQ ID NO: 5399 - protein, 11 aa, synthetic construct
ATNGHDSPHKS

SEQ ID NO: 5400 - protein, 11 aa, synthetic construct
MDGGHDSPHKS

SEQ ID NO: 5401 - protein, 11 aa, synthetic construct
QEVGHDSPHKS

SEQ ID NO: 5402 - protein, 11 aa, synthetic construct
ADQGHDSPHKS

SEQ ID NO: 5403 - protein, 11 aa, synthetic construct
NMNGHDSPHKS

SEQ ID NO: 5404 - protein, 11 aa, synthetic construct
TPWEHDSPHKS

SEQ ID NO: 5405 - protein, 11 aa, synthetic construct
IEMGHDSPHKS

SEQ ID NO: 5406 - protein, 11 aa, synthetic construct
TANEHDSPHKS

SEQ ID NO: 5407 - protein, 11 aa, synthetic construct
TINGHDSPHKS

SEQ ID NO: 5408 - protein, 11 aa, synthetic construct
QQQGHDSPHKS

SEQ ID NO: 5409 - protein, 11 aa, synthetic construct
TPQDHDSPHKS

SEQ ID NO: 5410 - protein, 11 aa, synthetic construct
HDWGHDSPHKS

SEQ ID NO: 5411 - protein, 11 aa, synthetic construct
IEGGHDSPHKS

SEQ ID NO: 5412 - protein, 5 aa, synthetic construct
QNQQT

SEQ ID NO: 5413 - protein, 5 aa, synthetic construct
QNRHT

SEQ ID NO: 5414 - protein, 5 aa, synthetic construct
RDQQT

SEQ ID NO: 5415 - protein, 5 aa, synthetic construct
PNLQT

SEQ ID NO: 5416 - protein, 5 aa, synthetic construct
HVRQT

SEQ ID NO: 5417 - protein, 5 aa, synthetic construct
PNQHT

SEQ ID NO: 5418 - protein, 5 aa, synthetic construct
QSQQT

SEQ ID NO: 5419 - protein, 5 aa, synthetic construct
QNQQI

SEQ ID NO: 5420 - protein, 5 aa, synthetic construct
QPAKT

SEQ ID NO: 5421 - protein, 5 aa, synthetic construct
QTQQN

SEQ ID NO: 5422 - protein, 5 aa, synthetic construct
QNLAT

SEQ ID NO: 5423 - protein, 5 aa, synthetic construct
QNQLT

SEQ ID NO: 5424 - protein, 5 aa, synthetic construct
QGQQT

SEQ ID NO: 5425 - protein, 5 aa, synthetic construct
LNRQS

SEQ ID NO: 5426 - protein, 5 aa, synthetic construct
HNQQT

SEQ ID NO: 5427 - protein, 5 aa, synthetic construct
QNPPT

SEQ ID NO: 5428 - protein, 5 aa, synthetic construct
QNLQT

SEQ ID NO: 5429 - protein, 5 aa, synthetic construct
QYQQT

SEQ ID NO: 5430 - protein, 5 aa, synthetic construct
QDQET

SEQ ID NO: 5431 - protein, 5 aa, synthetic construct
QNHQT

SEQ ID NO: 5432 - protein, 5 aa, synthetic construct
QDQQT

SEQ ID NO: 5433 - protein, 5 aa, synthetic construct
HWQQT

SEQ ID NO: 5434 - protein, 5 aa, synthetic construct
PNQQT

SEQ ID NO: 5435 - protein, 5 aa, synthetic construct
QNQLI

SEQ ID NO: 5436 - protein, 5 aa, synthetic construct
PEQQT

SEQ ID NO: 5437 - protein, 5 aa, synthetic construct
QRTMT

SEQ ID NO: 5438 - protein, 5 aa, synthetic construct
QNQQH

SEQ ID NO: 5439 - protein, 5 aa, synthetic construct
LHQHT

SEQ ID NO: 5440 - protein, 5 aa, synthetic construct
QHRIT

SEQ ID NO: 5441 - protein, 5 aa, synthetic construct
QYIHT

SEQ ID NO: 5442 - protein, 5 aa, synthetic construct
QKFET

SEQ ID NO: 5443 - protein, 5 aa, synthetic construct
QFPST

SEQ ID NO: 5444 - protein, 5 aa, synthetic construct
HNQQR

SEQ ID NO: 5445 - protein, 5 aa, synthetic construct
QAIKT

SEQ ID NO: 5446 - protein, 5 aa, synthetic construct
QNRQT

SEQ ID NO: 5447 - protein, 5 aa, synthetic construct
QYQHT

SEQ ID NO: 5448 - protein, 5 aa, synthetic construct
QNPQS

SEQ ID NO: 5449 - protein, 5 aa, synthetic construct
QHQLT

SEQ ID NO: 5450 - protein, 5 aa, synthetic construct
QSPPT

SEQ ID NO: 5451 - protein, 5 aa, synthetic construct
QAKLT

SEQ ID NO: 5452 - protein, 5 aa, synthetic construct
KSQQT

SEQ ID NO: 5453 - protein, 5 aa, synthetic construct
QDRPT

SEQ ID NO: 5454 - protein, 5 aa, synthetic construct
QSQQL

SEQ ID NO: 5455 - protein, 5 aa, synthetic construct
QAFHT

SEQ ID NO: 5456 - protein, 5 aa, synthetic construct
QKQQD

SEQ ID NO: 5457 - protein, 5 aa, synthetic construct
QNAQT

SEQ ID NO: 5458 - protein, 5 aa, synthetic construct
HNQLT

SEQ ID NO: 5459 - protein, 5 aa, synthetic construct
QNQQY

SEQ ID NO: 5460 - protein, 5 aa, synthetic construct
QKLNT

SEQ ID NO: 5461 - protein, 5 aa, synthetic construct
QNVQT

SEQ ID NO: 5462 - protein, 5 aa, synthetic construct
QAQQT

SEQ ID NO: 5463 - protein, 5 aa, synthetic construct
QNLQA

SEQ ID NO: 5464 - protein, 5 aa, synthetic construct
QTPPT

SEQ ID NO: 5465 - protein, 5 aa, synthetic construct
QYQHA

SEQ ID NO: 5466 - protein, 5 aa, synthetic construct
QGQQA

SEQ ID NO: 5467 - protein, 5 aa, synthetic construct
QPPAT

SEQ ID NO: 5468 - protein, 5 aa, synthetic construct
QERPT

SEQ ID NO: 5469 - protein, 5 aa, synthetic construct
QDLQT

SEQ ID NO: 5470 - protein, 5 aa, synthetic construct
QAMHT

SEQ ID NO: 5471 - protein, 5 aa, synthetic construct
LNQQT

SEQ ID NO: 5472 - protein, 5 aa, synthetic construct
QHPST

SEQ ID NO: 5473 - protein, 5 aa, synthetic construct
PGLQT

SEQ ID NO: 5474 - protein, 5 aa, synthetic construct
QGIRT

SEQ ID NO: 5475 - protein, 5 aa, synthetic construct
QAPAT

SEQ ID NO: 5476 - protein, 5 aa, synthetic construct
QSQQI

SEQ ID NO: 5477 - protein, 5 aa, synthetic construct
QIPPT

SEQ ID NO: 5478 - protein, 5 aa, synthetic construct
QTQLT

SEQ ID NO: 5479 - protein, 5 aa, synthetic construct
QAPST

SEQ ID NO: 5480 - protein, 5 aa, synthetic construct
QNTYA

SEQ ID NO: 5481 - protein, 5 aa, synthetic construct
QNQHI

SEQ ID NO: 5482 - protein, 5 aa, synthetic construct
QNHLT

SEQ ID NO: 5483 - protein, 5 aa, synthetic construct
QIGMT

SEQ ID NO: 5484 - protein, 5 aa, synthetic construct
LNKQT

SEQ ID NO: 5485 - protein, 5 aa, synthetic construct
QLQQT

SEQ ID NO: 5486 - protein, 5 aa, synthetic construct
QRMST

SEQ ID NO: 5487 - protein, 5 aa, synthetic construct
QGILT

SEQ ID NO: 5488 - protein, 5 aa, synthetic construct
QDRQT

SEQ ID NO: 5489 - protein, 5 aa, synthetic construct
RDWQT

SEQ ID NO: 5490 - protein, 5 aa, synthetic construct
QNTHD

SEQ ID NO: 5491 - protein, 5 aa, synthetic construct
PNLQI

SEQ ID NO: 5492 - protein, 5 aa, synthetic construct
QERST

SEQ ID NO: 5493 - protein, 5 aa, synthetic construct
QNYQT

SEQ ID NO: 5494 - protein, 5 aa, synthetic construct
QRTCT

SEQ ID NO: 5495 - protein, 5 aa, synthetic construct
QIGHT

SEQ ID NO: 5496 - protein, 5 aa, synthetic construct
QGAIT

SEQ ID NO: 5497 - protein, 5 aa, synthetic construct
QVPPT

SEQ ID NO: 5498 - protein, 5 aa, synthetic construct
QVQQI

SEQ ID NO: 5499 - protein, 5 aa, synthetic construct
LMRQT

SEQ ID NO: 5500 - protein, 5 aa, synthetic construct
QYSVT

SEQ ID NO: 5501 - protein, 5 aa, synthetic construct
QAITT

SEQ ID NO: 5502 - protein, 5 aa, synthetic construct
QKTLT

SEQ ID NO: 5503 - protein, 5 aa, synthetic construct
QNQWT

SEQ ID NO: 5504 - protein, 5 aa, synthetic construct
QLHHT

SEQ ID NO: 5505 - protein, 5 aa, synthetic construct
QNIII

SEQ ID NO: 5506 - protein, 5 aa, synthetic construct
QGHHT

SEQ ID NO: 5507 - protein, 5 aa, synthetic construct
QSKVT

SEQ ID NO: 5508 - protein, 5 aa, synthetic construct
QLPST

SEQ ID NO: 5509 - protein, 5 aa, synthetic construct
IGKQT

SEQ ID NO: 5510 - protein, 5 aa, synthetic construct
QAIHT

SEQ ID NO: 5511 - protein, 5 aa, synthetic construct
QHGLT

SEQ ID NO: 5512 - protein, 5 aa, synthetic construct
QFMCT

SEQ ID NO: 5513 - protein, 5 aa, synthetic construct
QHLQT

SEQ ID NO: 5514 - protein, 5 aa, synthetic construct
QNHQN

SEQ ID NO: 5515 - protein, 5 aa, synthetic construct
QPART

SEQ ID NO: 5516 - protein, 5 aa, synthetic construct
QSLQT

SEQ ID NO: 5517 - protein, 5 aa, synthetic construct
QSQLT

SEQ ID NO: 5518 - protein, 5 aa, synthetic construct
QDRQS

SEQ ID NO: 5519 - protein, 5 aa, synthetic construct
QMPST

SEQ ID NO: 5520 - protein, 5 aa, synthetic construct
QGSLT

SEQ ID NO: 5521 - protein, 5 aa, synthetic construct
QVPAT

SEQ ID NO: 5522 - protein, 5 aa, synthetic construct
QDKQT

SEQ ID NO: 5523 - protein, 5 aa, synthetic construct
HYQQT

SEQ ID NO: 5524 - protein, 5 aa, synthetic construct
QVPST

SEQ ID NO: 5525 - protein, 5 aa, synthetic construct
RGEQT

SEQ ID NO: 5526 - protein, 5 aa, synthetic construct
PGQQT

SEQ ID NO: 5527 - protein, 5 aa, synthetic construct
QSLQI

SEQ ID NO: 5528 - protein, 5 aa, synthetic construct
LEQQT

SEQ ID NO: 5529 - protein, 5 aa, synthetic construct
QNQST

SEQ ID NO: 5530 - protein, 5 aa, synthetic construct
QKVIT

SEQ ID NO: 5531 - protein, 5 aa, synthetic construct
QNNDQ

SEQ ID NO: 5532 - protein, 5 aa, synthetic construct
QSVHT

SEQ ID NO: 5533 - protein, 5 aa, synthetic construct
QPLGT

SEQ ID NO: 5534 - protein, 5 aa, synthetic construct
HNQET

SEQ ID NO: 5535 - protein, 5 aa, synthetic construct
QNLQI

SEQ ID NO: 5536 - protein, 5 aa, synthetic construct
QIQQT

SEQ ID NO: 5537 - protein, 5 aa, synthetic construct
QVRNT

SEQ ID NO: 5538 - protein, 5 aa, synthetic construct
PSNQT

SEQ ID NO: 5539 - protein, 5 aa, synthetic construct
QVGHT

SEQ ID NO: 5540 - protein, 5 aa, synthetic construct
QRDIT

SEQ ID NO: 5541 - protein, 5 aa, synthetic construct
QMPNT

SEQ ID NO: 5542 - protein, 5 aa, synthetic construct
RGLQT

SEQ ID NO: 5543 - protein, 5 aa, synthetic construct
QKQQT

SEQ ID NO: 5544 - protein, 5 aa, synthetic construct
PSLQT

SEQ ID NO: 5545 - protein, 5 aa, synthetic construct
QRDQT

SEQ ID NO: 5546 - protein, 5 aa, synthetic construct
QAKGT

SEQ ID NO: 5547 - protein, 5 aa, synthetic construct
QSAHT

SEQ ID NO: 5548 - protein, 5 aa, synthetic construct
QSTMT

SEQ ID NO: 5549 - protein, 5 aa, synthetic construct
QREMT

SEQ ID NO: 5550 - protein, 5 aa, synthetic construct
QYRAT

SEQ ID NO: 5551 - protein, 5 aa, synthetic construct
QWQQT

SEQ ID NO: 5552 - protein, 5 aa, synthetic construct
QRMNT

SEQ ID NO: 5553 - protein, 5 aa, synthetic construct
GDSQT

SEQ ID NO: 5554 - protein, 5 aa, synthetic construct
QKIST

SEQ ID NO: 5555 - protein, 5 aa, synthetic construct
PSMQT

SEQ ID NO: 5556 - protein, 5 aa, synthetic construct
SPRQT

SEQ ID NO: 5557 - protein, 5 aa, synthetic construct
MEQQT

SEQ ID NO: 5558 - protein, 5 aa, synthetic construct
QYQNT

SEQ ID NO: 5559 - protein, 5 aa, synthetic construct
QHQQT

SEQ ID NO: 5560 - protein, 5 aa, synthetic construct
INQQT

SEQ ID NO: 5561 - protein, 5 aa, synthetic construct
PNQQH

SEQ ID NO: 5562 - protein, 5 aa, synthetic construct
ENRQT

SEQ ID NO: 5563 - protein, 5 aa, synthetic construct
QTQQA

SEQ ID NO: 5564 - protein, 5 aa, synthetic construct
QNQAT

SEQ ID NO: 5565 - protein, 4 aa, synthetic construct
KTII

SEQ ID NO: 5566 - protein, 4 aa, synthetic construct
KTFP

SEQ ID NO: 5567 - protein, 4 aa, synthetic construct
KTEK

SEQ ID NO: 5568 - protein, 4 aa, synthetic construct
KTVN

SEQ ID NO: 5569 - protein, 4 aa, synthetic construct
KTFN

SEQ ID NO: 5570 - protein, 4 aa, synthetic construct
KTIN

SEQ ID NO: 5571 - protein, 4 aa, synthetic construct
TTIN

SEQ ID NO: 5572 - protein, 4 aa, synthetic construct
KSIN

SEQ ID NO: 5573 - protein, 4 aa, synthetic construct
KTER

SEQ ID NO: 5574 - protein, 4 aa, synthetic construct
KELH

SEQ ID NO: 5575 - protein, 4 aa, synthetic construct
KAIN

SEQ ID NO: 5576 - protein, 4 aa, synthetic construct
KTDN

SEQ ID NO: 5577 - protein, 4 aa, synthetic construct
KTFH

SEQ ID NO: 5578 - protein, 4 aa, synthetic construct
KTSN

SEQ ID NO: 5579 - protein, 4 aa, synthetic construct
ETIN

SEQ ID NO: 5580 - protein, 4 aa, synthetic construct
NTIN

SEQ ID NO: 5581 - protein, 4 aa, synthetic construct
KTEN

SEQ ID NO: 5582 - protein, 4 aa, synthetic construct
KTSS

SEQ ID NO: 5583 - protein, 4 aa, synthetic construct
KTCN

SEQ ID NO: 5584 - protein, 4 aa, synthetic construct
KTEH

SEQ ID NO: 5585 - protein, 4 aa, synthetic construct
KAEM

SEQ ID NO: 5586 - protein, 4 aa, synthetic construct
KATN

SEQ ID NO: 5587 - protein, 4 aa, synthetic construct
KAIK

SEQ ID NO: 5588 - protein, 4 aa, synthetic construct
KTDK

SEQ ID NO: 5589 - protein, 4 aa, synthetic construct
KTFK

SEQ ID NO: 5590 - protein, 4 aa, synthetic construct
KSDQ

SEQ ID NO: 5591 - protein, 4 aa, synthetic construct
KTEI

SEQ ID NO: 5592 - protein, 4 aa, synthetic construct
KTID

SEQ ID NO: 5593 - protein, 4 aa, synthetic construct
KNTN

SEQ ID NO: 5594 - protein, 4 aa, synthetic construct
KTET

SEQ ID NO: 5595 - protein, 4 aa, synthetic construct
KTEL

SEQ ID NO: 5596 - protein, 4 aa, synthetic construct
KNIN

SEQ ID NO: 5597 - protein, 4 aa, synthetic construct
KTEA

SEQ ID NO: 5598 - protein, 4 aa, synthetic construct
KTAN

SEQ ID NO: 5599 - protein, 4 aa, synthetic construct
NTIY

SEQ ID NO: 5600 - protein, 4 aa, synthetic construct
KTFS

SEQ ID NO: 5601 - protein, 4 aa, synthetic construct
KTES

SEQ ID NO: 5602 - protein, 4 aa, synthetic construct
KTTN

SEQ ID NO: 5603 - protein, 4 aa, synthetic construct
KTED

SEQ ID NO: 5604 - protein, 4 aa, synthetic construct
KTNN

SEQ ID NO: 5605 - protein, 4 aa, synthetic construct
KEVH

SEQ ID NO: 5606 - protein, 4 aa, synthetic construct
KTIS

SEQ ID NO: 5607 - protein, 4 aa, synthetic construct
KTVR

SEQ ID NO: 5608 - protein, 4 aa, synthetic construct
KTDR

SEQ ID NO: 5609 - protein, 4 aa, synthetic construct
ETIK

SEQ ID NO: 5610 - protein, 4 aa, synthetic construct
KNHI

SEQ ID NO: 5611 - protein, 4 aa, synthetic construct
KESD

SEQ ID NO: 5612 - protein, 4 aa, synthetic construct
KTIK

SEQ ID NO: 5613 - protein, 4 aa, synthetic construct
KTDL

SEQ ID NO: 5614 - protein, 4 aa, synthetic construct
KTVP

SEQ ID NO: 5615 - protein, 4 aa, synthetic construct
KTVI

SEQ ID NO: 5616 - protein, 4 aa, synthetic construct
KAEH

SEQ ID NO: 5617 - protein, 4 aa, synthetic construct
KNCL

SEQ ID NO: 5618 - protein, 4 aa, synthetic construct
KTVK

SEQ ID NO: 5619 - protein, 4 aa, synthetic construct
KNAD

SEQ ID NO: 5620 - protein, 4 aa, synthetic construct
KTIT

SEQ ID NO: 5621 - protein, 4 aa, synthetic construct
KNCV

SEQ ID NO: 5622 - protein, 4 aa, synthetic construct
KNAL

SEQ ID NO: 5623 - protein, 4 aa, synthetic construct
KVIN

SEQ ID NO: 5624 - protein, 4 aa, synthetic construct
KTEF

SEQ ID NO: 5625 - protein, 4 aa, synthetic construct
KTRE

SEQ ID NO: 5626 - protein, 4 aa, synthetic construct
KQGE

SEQ ID NO: 5627 - protein, 4 aa, synthetic construct
KSEK

SEQ ID NO: 5628 - protein, 4 aa, synthetic construct
KNVN

SEQ ID NO: 5629 - protein, 4 aa, synthetic construct
KGGE

SEQ ID NO: 5630 - protein, 4 aa, synthetic construct
KEFV

SEQ ID NO: 5631 - protein, 4 aa, synthetic construct
KSDK

SEQ ID NO: 5632 - protein, 4 aa, synthetic construct
KTEQ

SEQ ID NO: 5633 - protein, 4 aa, synthetic construct
KEVQ

SEQ ID NO: 5634 - protein, 4 aa, synthetic construct
KTEY

SEQ ID NO: 5635 - protein, 4 aa, synthetic construct
KNCW

SEQ ID NO: 5636 - protein, 4 aa, synthetic construct
KTDV

SEQ ID NO: 5637 - protein, 4 aa, synthetic construct
KSDI

SEQ ID NO: 5638 - protein, 4 aa, synthetic construct
KNSI

SEQ ID NO: 5639 - protein, 4 aa, synthetic construct
KNSL

SEQ ID NO: 5640 - protein, 4 aa, synthetic construct
KEVV

SEQ ID NO: 5641 - protein, 4 aa, synthetic construct
KTEP

SEQ ID NO: 5642 - protein, 4 aa, synthetic construct
KSEL

SEQ ID NO: 5643 - protein, 4 aa, synthetic construct
KTWQ

SEQ ID NO: 5644 - protein, 4 aa, synthetic construct
KTEV

SEQ ID NO: 5645 - protein, 4 aa, synthetic construct
KAVN

SEQ ID NO: 5646 - protein, 4 aa, synthetic construct
KGVL

SEQ ID NO: 5647 - protein, 4 aa, synthetic construct
KTEG

SEQ ID NO: 5648 - protein, 4 aa, synthetic construct
KTRD

SEQ ID NO: 5649 - protein, 4 aa, synthetic construct
KTGN

SEQ ID NO: 5650 - protein, 4 aa, synthetic construct
KNAI

SEQ ID NO: 5651 - protein, 4 aa, synthetic construct
KAEN

SEQ ID NO: 5652 - protein, 4 aa, synthetic construct
KAET

SEQ ID NO: 5653 - protein, 4 aa, synthetic construct
KTVH

SEQ ID NO: 5654 - protein, 4 aa, synthetic construct
KETA

SEQ ID NO: 5655 - protein, 4 aa, synthetic construct
KNNL

SEQ ID NO: 5656 - protein, 4 aa, synthetic construct
EAIN

SEQ ID NO: 5657 - protein, 4 aa, synthetic construct
KSLN

SEQ ID NO: 5658 - protein, 4 aa, synthetic construct
KTIP

SEQ ID NO: 5659 - protein, 4 aa, synthetic construct
KTIH

SEQ ID NO: 5660 - protein, 18 aa, synthetic construct
KTINGSGSPHSKAQNQQT

SEQ ID NO: 5661 - protein, 5 aa, synthetic construct
NPHKS

SEQ ID NO: 5662 - protein, 6 aa, synthetic construct
NPHKSG

SEQ ID NO: 5663 - protein, 6 aa, synthetic construct
SPHKIV

SEQ ID NO: 5664 - protein, 6 aa, synthetic construct
GHDNPH

SEQ ID NO: 5665 - protein, 6 aa, synthetic construct
AHDSPH

SEQ ID NO: 5666 - protein, 6 aa, synthetic construct
KHDSPH

SEQ ID NO: 5667 - protein, 6 aa, synthetic construct
WHDSPH

SEQ ID NO: 5668 - protein, 6 aa, synthetic construct
RHDSPH

SEQ ID NO: 5669 - protein, 6 aa, synthetic construct
LHDSPH

SEQ ID NO: 5670 - protein, 6 aa, synthetic construct
IHDSPH

SEQ ID NO: 5671 - protein, 6 aa, synthetic construct
MHDSPH

SEQ ID NO: 5672 - protein, 6 aa, synthetic construct
NHDSPH

SEQ ID NO: 5673 - protein, 6 aa, synthetic construct
THDSPH

SEQ ID NO: 5674 - protein, 6 aa, synthetic construct
EHDSPH

SEQ ID NO: 5675 - protein, 6 aa, synthetic construct
QHDSPH

SEQ ID NO: 5676 - protein, 6 aa, synthetic construct
YHDSPH

SEQ ID NO: 5677 - protein, 6 aa, synthetic construct
HHDSPH

SEQ ID NO: 5678 - protein, 6 aa, synthetic construct
FHDSPH

SEQ ID NO: 5679 - protein, 6 aa, synthetic construct
VHDSPH

SEQ ID NO: 5680 - protein, 9 aa, synthetic construct
GHDNPHKSG

SEQ ID NO: 5681 - protein, 9 aa, synthetic construct
AHDSPHKSG

SEQ ID NO: 5682 - protein, 9 aa, synthetic construct
AHDSPHKIG

SEQ ID NO: 5683 - protein, 9 aa, synthetic construct
KHDSPHKSG

SEQ ID NO: 5684 - protein, 9 aa, synthetic construct
WHDSPHKSG

SEQ ID NO: 5685 - protein, 9 aa, synthetic construct
RHDSPHKSG

SEQ ID NO: 5686 - protein, 9 aa, synthetic construct
LHDSPHKSG

SEQ ID NO: 5687 - protein, 9 aa, synthetic construct
IHDSPHKSG

SEQ ID NO: 5688 - protein, 9 aa, synthetic construct
MHDSPHKSG

SEQ ID NO: 5689 - protein, 9 aa, synthetic construct
NHDSPHKSG

SEQ ID NO: 5690 - protein, 9 aa, synthetic construct
THDSPHKSG

SEQ ID NO: 5691 - protein, 9 aa, synthetic construct
EHDSPHKSG

SEQ ID NO: 5692 - protein, 9 aa, synthetic construct
QHDSPHKSG

SEQ ID NO: 5693 - protein, 9 aa, synthetic construct
RHDSPHKIV

SEQ ID NO: 5694 - protein, 9 aa, synthetic construct
YHDSPHKSG

SEQ ID NO: 5695 - protein, 9 aa, synthetic construct
HHDSPHKSG

SEQ ID NO: 5696 - protein, 9 aa, synthetic construct
FHDSPHKSG

SEQ ID NO: 5697 - protein, 9 aa, synthetic construct
VHDSPHKSG

SEQ ID NO: 5698 - protein, 5 aa, synthetic construct
QIRQT

SEQ ID NO: 5699 - protein, 5 aa, synthetic construct
QNQHA

SEQ ID NO: 5700 - protein, 5 aa, synthetic construct
QSVQT

SEQ ID NO: 5701 - protein, 5 aa, synthetic construct
RSQQT

SEQ ID NO: 5702 - protein, 5 aa, synthetic construct
QNKLE

SEQ ID NO: 5703 - protein, 5 aa, synthetic construct
QNQQK

SEQ ID NO: 5704 - protein, 5 aa, synthetic construct
QHQQA

SEQ ID NO: 5705 - protein, 5 aa, synthetic construct
QIQHT

SEQ ID NO: 5706 - protein, 5 aa, synthetic construct
PRQQT

SEQ ID NO: 5707 - protein, 5 aa, synthetic construct
HTQQT

SEQ ID NO: 5708 - protein, 5 aa, synthetic construct
QRQHT

SEQ ID NO: 5709 - protein, 5 aa, synthetic construct
QNQQS

SEQ ID NO: 5710 - protein, 5 aa, synthetic construct
RNQET

SEQ ID NO: 5711 - protein, 5 aa, synthetic construct
KNQQT

SEQ ID NO: 5712 - protein, 5 aa, synthetic construct
QTQQT

SEQ ID NO: 5713 - protein, 5 aa, synthetic construct
QTQQI

SEQ ID NO: 5714 - protein, 5 aa, synthetic construct
QSKQA

SEQ ID NO: 5715 - protein, 5 aa, synthetic construct
QNQPP

SEQ ID NO: 5716 - protein, 5 aa, synthetic construct
QSPQT

SEQ ID NO: 5717 - protein, 5 aa, synthetic construct
QNQQG

SEQ ID NO: 5718 - protein, 5 aa, synthetic construct
QNQHT

SEQ ID NO: 5719 - protein, 5 aa, synthetic construct
QTRQT

SEQ ID NO: 5720 - protein, 5 aa, synthetic construct
QNLHT

SEQ ID NO: 5721 - protein, 5 aa, synthetic construct
QNQET

SEQ ID NO: 5722 - protein, 5 aa, synthetic construct
LNQPT

SEQ ID NO: 5723 - protein, 5 aa, synthetic construct
QNQDT

SEQ ID NO: 5724 - protein, 5 aa, synthetic construct
RNQQT

SEQ ID NO: 5725 - protein, 5 aa, synthetic construct
QNLLT

SEQ ID NO: 5726 - protein, 5 aa, synthetic construct
QLVIT

SEQ ID NO: 5727 - protein, 5 aa, synthetic construct
RTQET

SEQ ID NO: 5728 - protein, 5 aa, synthetic construct
QTHQT

SEQ ID NO: 5729 - protein, 5 aa, synthetic construct
QNQPA

SEQ ID NO: 5730 - protein, 5 aa, synthetic construct
QDQHT

SEQ ID NO: 5731 - protein, 5 aa, synthetic construct
QSQHT

SEQ ID NO: 5732 - protein, 5 aa, synthetic construct
RNQQI

SEQ ID NO: 5733 - protein, 5 aa, synthetic construct
VRQQT

SEQ ID NO: 5734 - protein, 5 aa, synthetic construct
QNQHS

SEQ ID NO: 5735 - protein, 5 aa, synthetic construct
AWQQT

SEQ ID NO: 5736 - protein, 5 aa, synthetic construct
QSVPT

SEQ ID NO: 5737 - protein, 5 aa, synthetic construct
QNIQP

SEQ ID NO: 5738 - protein, 5 aa, synthetic construct
QNHLN

SEQ ID NO: 5739 - protein, 5 aa, synthetic construct
LDQQT

SEQ ID NO: 5740 - protein, 5 aa, synthetic construct
PDQQS

SEQ ID NO: 5741 - protein, 5 aa, synthetic construct
ESQQT

SEQ ID NO: 5742 - protein, 5 aa, synthetic construct
QNKQT

SEQ ID NO: 5743 - protein, 5 aa, synthetic construct
QRQLT

SEQ ID NO: 5744 - protein, 5 aa, synthetic construct
QIIVT

SEQ ID NO: 5745 - protein, 5 aa, synthetic construct
QKQST

SEQ ID NO: 5746 - protein, 5 aa, synthetic construct
QSHQT

SEQ ID NO: 5747 - protein, 5 aa, synthetic construct
QFVVT

SEQ ID NO: 5748 - protein, 5 aa, synthetic construct
QSQPT

SEQ ID NO: 5749 - protein, 5 aa, synthetic construct
QNEQT

SEQ ID NO: 5750 - protein, 5 aa, synthetic construct
RNRQT

SEQ ID NO: 5751 - protein, 5 aa, synthetic construct
QSKQT

SEQ ID NO: 5752 - protein, 5 aa, synthetic construct
QNPLT

SEQ ID NO: 5753 - protein, 5 aa, synthetic construct
RDQKT

SEQ ID NO: 5754 - protein, 5 aa, synthetic construct
HNQQN

SEQ ID NO: 5755 - protein, 5 aa, synthetic construct
QWKRT

SEQ ID NO: 5756 - protein, 5 aa, synthetic construct
QNHQI

SEQ ID NO: 5757 - protein, 5 aa, synthetic construct
QNQQA

SEQ ID NO: 5758 - protein, 5 aa, synthetic construct
QNQLN

SEQ ID NO: 5759 - protein, 5 aa, synthetic construct
QTQPT

SEQ ID NO: 5760 - protein, 5 aa, synthetic construct
QKQLT

SEQ ID NO: 5761 - protein, 5 aa, synthetic construct
RNQLA

SEQ ID NO: 5762 - protein, 5 aa, synthetic construct
RNQQS

SEQ ID NO: 5763 - protein, 5 aa, synthetic construct
ISIQT

SEQ ID NO: 5764 - protein, 5 aa, synthetic construct
QNQQN

SEQ ID NO: 5765 - protein, 5 aa, synthetic construct
QSQQS

SEQ ID NO: 5766 - protein, 5 aa, synthetic construct
QTVCT

SEQ ID NO: 5767 - protein, 5 aa, synthetic construct
QYQQI

SEQ ID NO: 5768 - protein, 5 aa, synthetic construct
QQIMT

SEQ ID NO: 5769 - protein, 5 aa, synthetic construct
QNEQS

SEQ ID NO: 5770 - protein, 5 aa, synthetic construct
LNHQT

SEQ ID NO: 5771 - protein, 5 aa, synthetic construct
QMIHT

SEQ ID NO: 5772 - protein, 5 aa, synthetic construct
RNHQS

SEQ ID NO: 5773 - protein, 5 aa, synthetic construct
QKMNT

SEQ ID NO: 5774 - protein, 5 aa, synthetic construct
QSQQN

SEQ ID NO: 5775 - protein, 4 aa, synthetic construct
KSIY

SEQ ID NO: 5776 - protein, 4 aa, synthetic construct
KIIN

SEQ ID NO: 5777 - protein, 4 aa, synthetic construct
KAII

SEQ ID NO: 5778 - protein, 4 aa, synthetic construct
KAIS

SEQ ID NO: 5779 - protein, 4 aa, synthetic construct
KTVD

SEQ ID NO: 5780 - protein, 4 aa, synthetic construct
KTIE

SEQ ID NO: 5781 - protein, 4 aa, synthetic construct
KTIY

SEQ ID NO: 5782 - protein, 4 aa, synthetic construct
KNVV

SEQ ID NO: 5783 - protein, 4 aa, synthetic construct
KTDA

SEQ ID NO: 5784 - protein, 4 aa, synthetic construct
KTEM

SEQ ID NO: 5785 - protein, 4 aa, synthetic construct
KIVN

SEQ ID NO: 5786 - protein, 4 aa, synthetic construct
KIGN

SEQ ID NO: 5787 - protein, 4 aa, synthetic construct
KEVM

SEQ ID NO: 5788 - protein, 4 aa, synthetic construct
KYQV

SEQ ID NO: 5789 - protein, 4 aa, synthetic construct
KTVE

SEQ ID NO: 5790 - protein, 4 aa, synthetic construct
KAID

SEQ ID NO: 5791 - protein, 4 aa, synthetic construct
KTIM

SEQ ID NO: 5792 - protein, 4 aa, synthetic construct
KEVG

SEQ ID NO: 5793 - protein, 4 aa, synthetic construct
KSEM

SEQ ID NO: 5794 - protein, 4 aa, synthetic construct
KAQQ

SEQ ID NO: 5795 - protein, 4 aa, synthetic construct
KCGE

SEQ ID NO: 5796 - protein, 4 aa, synthetic construct
KASN

SEQ ID NO: 5797 - protein, 4 aa, synthetic construct
KTIG

SEQ ID NO: 5798 - protein, 4 aa, synthetic construct
KTDP

SEQ ID NO: 5799 - protein, 4 aa, synthetic construct
KELV

SEQ ID NO: 5800 - protein, 4 aa, synthetic construct
KELM

SEQ ID NO: 5801 - protein, 4 aa, synthetic construct
KNEI

SEQ ID NO: 5802 - protein, 4 aa, synthetic construct
KTPN

SEQ ID NO: 5803 - protein, 4 aa, synthetic construct
KITN

SEQ ID NO: 5804 - protein, 4 aa, synthetic construct
KTDI

SEQ ID NO: 5805 - protein, 4 aa, synthetic construct
KTDQ

SEQ ID NO: 5806 - protein, 4 aa, synthetic construct
KGIN

SEQ ID NO: 5807 - protein, 4 aa, synthetic construct
KSEI

SEQ ID NO: 5808 - protein, 4 aa, synthetic construct
KWSA

SEQ ID NO: 5809 - protein, 4 aa, synthetic construct
KELA

SEQ ID NO: 5810 - protein, 4 aa, synthetic construct
KQTQ

SEQ ID NO: 5811 - protein, 4 aa, synthetic construct
KGAD

SEQ ID NO: 5812 - protein, 4 aa, synthetic construct
KVGE

SEQ ID NO: 5813 - protein, 4 aa, synthetic construct
KANE

SEQ ID NO: 5814 - protein, 4 aa, synthetic construct
KTDT

SEQ ID NO: 5815 - protein, 4 aa, synthetic construct
KTCI

SEQ ID NO: 5816 - protein, 4 aa, synthetic construct
KELR

SEQ ID NO: 5817 - protein, 4 aa, synthetic construct
KCQI

SEQ ID NO: 5818 - protein, 4 aa, synthetic construct
KGVM

SEQ ID NO: 5819 - protein, 4 aa, synthetic construct
KACD

SEQ ID NO: 5820 - protein, 4 aa, synthetic construct
KNEL

SEQ ID NO: 5821 - protein, 4 aa, synthetic construct
KAAE

SEQ ID NO: 5822 - protein, 4 aa, synthetic construct
KGQN

SEQ ID NO: 5823 - protein, 4 aa, synthetic construct
KNEF

SEQ ID NO: 5824 - protein, 4 aa, synthetic construct
KTSI

SEQ ID NO: 5825 - protein, 4 aa, synthetic construct
KCDQ

SEQ ID NO: 5826 - protein, 4 aa, synthetic construct
KEIL

SEQ ID NO: 5827 - protein, 4 aa, synthetic construct
KTPD

SEQ ID NO: 5828 - protein, 18 aa, synthetic construct
KTINGHDSPHKSGQNQQT

SEQ ID NO: 5829 - protein, 4 aa, synthetic construct
SKAQ

SEQ ID NO: 5830 - protein, 4 aa, synthetic construct
SMYM

SEQ ID NO: 5831 - protein, 4 aa, synthetic construct
SKAF

SEQ ID NO: 5832 - protein, 4 aa, synthetic construct
SKLK

SEQ ID NO: 5833 - protein, 4 aa, synthetic construct
SKRH

SEQ ID NO: 5834 - protein, 4 aa, synthetic construct
SKWR

SEQ ID NO: 5835 - protein, 4 aa, synthetic construct
SRCR

SEQ ID NO: 5836 - protein, 4 aa, synthetic construct
SFTC

SEQ ID NO: 5837 - protein, 4 aa, synthetic construct
SKFF

SEQ ID NO: 5838 - protein, 4 aa, synthetic construct
IVWQ

SEQ ID NO: 5839 - protein, 4 aa, synthetic construct
SKYF

SEQ ID NO: 5840 - protein, 4 aa, synthetic construct
SKAR

SEQ ID NO: 5841 - protein, 4 aa, synthetic construct
SCHQ

SEQ ID NO: 5842 - protein, 4 aa, synthetic construct
FPWQ

SEQ ID NO: 5843 - protein, 4 aa, synthetic construct
SKIR

SEQ ID NO: 5844 - protein, 4 aa, synthetic construct
VYYQ

SEQ ID NO: 5845 - protein, 4 aa, synthetic construct
SLYW

SEQ ID NO: 5846 - protein, 4 aa, synthetic construct
SKPK

SEQ ID NO: 5847 - protein, 4 aa, synthetic construct
SRFW

SEQ ID NO: 5848 - protein, 4 aa, synthetic construct
SRMR

SEQ ID NO: 5849 - protein, 4 aa, synthetic construct
SVKK

SEQ ID NO: 5850 - protein, 4 aa, synthetic construct
SWAP

SEQ ID NO: 5851 - protein, 4 aa, synthetic construct
SLWK

SEQ ID NO: 5852 - protein, 4 aa, synthetic construct
SFRP

SEQ ID NO: 5853 - protein, 4 aa, synthetic construct
SKKV

SEQ ID NO: 5854 - protein, 4 aa, synthetic construct
SYAF

SEQ ID NO: 5855 - protein, 4 aa, synthetic construct
SKAC

SEQ ID NO: 5856 - protein, 4 aa, synthetic construct
SKRL

SEQ ID NO: 5857 - protein, 4 aa, synthetic construct
SCSR

SEQ ID NO: 5858 - protein, 4 aa, synthetic construct
SRCP

SEQ ID NO: 5859 - protein, 4 aa, synthetic construct
SGAC

SEQ ID NO: 5860 - protein, 4 aa, synthetic construct
SKFR

SEQ ID NO: 5861 - protein, 4 aa, synthetic construct
SFPF

SEQ ID NO: 5862 - protein, 4 aa, synthetic construct
SFFG

SEQ ID NO: 5863 - protein, 4 aa, synthetic construct
SMCQ

SEQ ID NO: 5864 - protein, 4 aa, synthetic construct
SKLF

SEQ ID NO: 5865 - protein, 4 aa, synthetic construct
SKTR

SEQ ID NO: 5866 - protein, 4 aa, synthetic construct
SGKR

SEQ ID NO: 5867 - protein, 4 aa, synthetic construct
FYRQ

SEQ ID NO: 5868 - protein, 4 aa, synthetic construct
CRVQ

SEQ ID NO: 5869 - protein, 4 aa, synthetic construct
YGIQ

SEQ ID NO: 5870 - protein, 4 aa, synthetic construct
VNCQ

SEQ ID NO: 5871 - protein, 4 aa, synthetic construct
SKPF

SEQ ID NO: 5872 - protein, 4 aa, synthetic construct
SLAW

SEQ ID NO: 5873 - protein, 4 aa, synthetic construct
SKRS

SEQ ID NO: 5874 - protein, 4 aa, synthetic construct
WSYQ

SEQ ID NO: 5875 - protein, 4 aa, synthetic construct
RWLQ

SEQ ID NO: 5876 - protein, 4 aa, synthetic construct
PSCQ

SEQ ID NO: 5877 - protein, 4 aa, synthetic construct
SSWL

SEQ ID NO: 5878 - protein, 4 aa, synthetic construct
SKRR

SEQ ID NO: 5879 - protein, 4 aa, synthetic construct
SKGC

SEQ ID NO: 5880 - protein, 4 aa, synthetic construct
VPWQ

SEQ ID NO: 5881 - protein, 4 aa, synthetic construct
SKRY

SEQ ID NO: 5882 - protein, 4 aa, synthetic construct
SGCQ

SEQ ID NO: 5883 - protein, 4 aa, synthetic construct
SFTP

SEQ ID NO: 5884 - protein, 4 aa, synthetic construct
STTC

SEQ ID NO: 5885 - protein, 4 aa, synthetic construct
PKRQ

SEQ ID NO: 5886 - protein, 4 aa, synthetic construct
SKCF

SEQ ID NO: 5887 - protein, 4 aa, synthetic construct
WVPQ

SEQ ID NO: 5888 - protein, 4 aa, synthetic construct
SFWS

SEQ ID NO: 5889 - protein, 4 aa, synthetic construct
SKFK

SEQ ID NO: 5890 - protein, 4 aa, synthetic construct
RIKQ

SEQ ID NO: 5891 - protein, 4 aa, synthetic construct
SKAP

SEQ ID NO: 5892 - protein, 4 aa, synthetic construct
SFRY

SEQ ID NO: 5893 - protein, 4 aa, synthetic construct
SKMI

SEQ ID NO: 5894 - protein, 4 aa, synthetic construct
LRWQ

SEQ ID NO: 5895 - protein, 4 aa, synthetic construct
LPTQ

SEQ ID NO: 5896 - protein, 4 aa, synthetic construct
SKWK

SEQ ID NO: 5897 - protein, 4 aa, synthetic construct
SYMR

SEQ ID NO: 5898 - protein, 4 aa, synthetic construct
SKAA

SEQ ID NO: 5899 - protein, 4 aa, synthetic construct
LLCQ

SEQ ID NO: 5900 - protein, 4 aa, synthetic construct
RCCQ

SEQ ID NO: 5901 - protein, 4 aa, synthetic construct
LCVQ

SEQ ID NO: 5902 - protein, 4 aa, synthetic construct
SKLT

SEQ ID NO: 5903 - protein, 4 aa, synthetic construct
SKLC

SEQ ID NO: 5904 - protein, 4 aa, synthetic construct
SYLV

SEQ ID NO: 5905 - protein, 4 aa, synthetic construct
QGCQ

SEQ ID NO: 5906 - protein, 4 aa, synthetic construct
MAFQ

SEQ ID NO: 5907 - protein, 4 aa, synthetic construct
SKWG

SEQ ID NO: 5908 - protein, 4 aa, synthetic construct
SKIL

SEQ ID NO: 5909 - protein, 4 aa, synthetic construct
SFQI

SEQ ID NO: 5910 - protein, 4 aa, synthetic construct
SKAL

SEQ ID NO: 5911 - protein, 4 aa, synthetic construct
SKAH

SEQ ID NO: 5912 - protein, 4 aa, synthetic construct
SLCL

SEQ ID NO: 5913 - protein, 4 aa, synthetic construct
RPWQ

SEQ ID NO: 5914 - protein, 4 aa, synthetic construct
RPRQ

SEQ ID NO: 5915 - protein, 4 aa, synthetic construct
SCPQ

SEQ ID NO: 5916 - protein, 4 aa, synthetic construct
SVRY

SEQ ID NO: 5917 - protein, 4 aa, synthetic construct
SVRC

SEQ ID NO: 5918 - protein, 4 aa, synthetic construct
SKMP

SEQ ID NO: 5919 - protein, 4 aa, synthetic construct
SKKT

SEQ ID NO: 5920 - protein, 4 aa, synthetic construct
SLPY

SEQ ID NO: 5921 - protein, 4 aa, synthetic construct
VYHQ

SEQ ID NO: 5922 - protein, 4 aa, synthetic construct
SYTR

SEQ ID NO: 5923 - protein, 4 aa, synthetic construct
LVYQ

SEQ ID NO: 5924 - protein, 4 aa, synthetic construct
YRYQ

SEQ ID NO: 5925 - protein, 4 aa, synthetic construct
SWLK

SEQ ID NO: 5926 - protein, 4 aa, synthetic construct
CPAQ

SEQ ID NO: 5927 - protein, 4 aa, synthetic construct
SMCT

SEQ ID NO: 5928 - protein, 4 aa, synthetic construct
SPPD

SEQ ID NO: 5929 - protein, 4 aa, synthetic construct
SKRN

SEQ ID NO: 5930 - protein, 4 aa, synthetic construct
RWTQ

SEQ ID NO: 5931 - protein, 4 aa, synthetic construct
PRKQ

SEQ ID NO: 5932 - protein, 4 aa, synthetic construct
SKCS

SEQ ID NO: 5933 - protein, 4 aa, synthetic construct
PFVQ

SEQ ID NO: 5934 - protein, 4 aa, synthetic construct
SKLP

SEQ ID NO: 5935 - protein, 4 aa, synthetic construct
SKSE

SEQ ID NO: 5936 - protein, 4 aa, synthetic construct
WVAQ

SEQ ID NO: 5937 - protein, 4 aa, synthetic construct
SLYQ

SEQ ID NO: 5938 - protein, 4 aa, synthetic construct
SKVR

SEQ ID NO: 5939 - protein, 4 aa, synthetic construct
CALQ

SEQ ID NO: 5940 - protein, 4 aa, synthetic construct
SSCT

SEQ ID NO: 5941 - protein, 4 aa, synthetic construct
SKNS

SEQ ID NO: 5942 - protein, 4 aa, synthetic construct
SKRK

SEQ ID NO: 5943 - protein, 4 aa, synthetic construct
LCTQ

SEQ ID NO: 5944 - protein, 4 aa, synthetic construct
STCL

SEQ ID NO: 5945 - protein, 4 aa, synthetic construct
SYAR

SEQ ID NO: 5946 - protein, 4 aa, synthetic construct
SKQR

SEQ ID NO: 5947 - protein, 4 aa, synthetic construct
SKRV

SEQ ID NO: 5948 - protein, 4 aa, synthetic construct
KSGQ

SEQ ID NO: 5949 - protein, 4 aa, synthetic construct
SYYS

SEQ ID NO: 5950 - protein, 4 aa, synthetic construct
SLTC

SEQ ID NO: 5951 - protein, 4 aa, synthetic construct
SCQS

SEQ ID NO: 5952 - protein, 4 aa, synthetic construct
SKAK

SEQ ID NO: 5953 - protein, 4 aa, synthetic construct
SKPQ

SEQ ID NO: 5954 - protein, 4 aa, synthetic construct
FPFQ

SEQ ID NO: 5955 - protein, 4 aa, synthetic construct
SKCT

SEQ ID NO: 5956 - protein, 4 aa, synthetic construct
SVFE

SEQ ID NO: 5957 - protein, 4 aa, synthetic construct
GRYQ

SEQ ID NO: 5958 - protein, 4 aa, synthetic construct
KAQA

SEQ ID NO: 5959 - protein, 4 aa, synthetic construct
KAQN

SEQ ID NO: 5960 - protein, 4 aa, synthetic construct
MYMN

SEQ ID NO: 5961 - protein, 4 aa, synthetic construct
KAFY

SEQ ID NO: 5962 - protein, 4 aa, synthetic construct
KLKR

SEQ ID NO: 5963 - protein, 4 aa, synthetic construct
KRHR

SEQ ID NO: 5964 - protein, 4 aa, synthetic construct
KAQK

SEQ ID NO: 5965 - protein, 4 aa, synthetic construct
KWRL

SEQ ID NO: 5966 - protein, 4 aa, synthetic construct
RCRN

SEQ ID NO: 5967 - protein, 4 aa, synthetic construct
FTCN

SEQ ID NO: 5968 - protein, 4 aa, synthetic construct
KFFI

SEQ ID NO: 5969 - protein, 4 aa, synthetic construct
KAQY

SEQ ID NO: 5970 - protein, 4 aa, synthetic construct
VWQN

SEQ ID NO: 5971 - protein, 4 aa, synthetic construct
KYFM

SEQ ID NO: 5972 - protein, 4 aa, synthetic construct
KARQ

SEQ ID NO: 5973 - protein, 4 aa, synthetic construct
CHQN

SEQ ID NO: 5974 - protein, 4 aa, synthetic construct
PWQN

SEQ ID NO: 5975 - protein, 4 aa, synthetic construct
KIRR

SEQ ID NO: 5976 - protein, 4 aa, synthetic construct
YYQN

SEQ ID NO: 5977 - protein, 4 aa, synthetic construct
LYWN

SEQ ID NO: 5978 - protein, 4 aa, synthetic construct
KPKR

SEQ ID NO: 5979 - protein, 4 aa, synthetic construct
KAFS

SEQ ID NO: 5980 - protein, 4 aa, synthetic construct
RFWN

SEQ ID NO: 5981 - protein, 4 aa, synthetic construct
KAQC

SEQ ID NO: 5982 - protein, 4 aa, synthetic construct
RMRN

SEQ ID NO: 5983 - protein, 4 aa, synthetic construct
VKKN

SEQ ID NO: 5984 - protein, 4 aa, synthetic construct
WAPN

SEQ ID NO: 5985 - protein, 4 aa, synthetic construct
LWKN

SEQ ID NO: 5986 - protein, 4 aa, synthetic construct
KARW

SEQ ID NO: 5987 - protein, 4 aa, synthetic construct
FRPN

SEQ ID NO: 5988 - protein, 4 aa, synthetic construct
KKVF

SEQ ID NO: 5989 - protein, 4 aa, synthetic construct
YAFN

SEQ ID NO: 5990 - protein, 4 aa, synthetic construct
KACS

SEQ ID NO: 5991 - protein, 4 aa, synthetic construct
KRLW

SEQ ID NO: 5992 - protein, 4 aa, synthetic construct
CSRN

SEQ ID NO: 5993 - protein, 4 aa, synthetic construct
RCPN

SEQ ID NO: 5994 - protein, 4 aa, synthetic construct
GACN

SEQ ID NO: 5995 - protein, 4 aa, synthetic construct
KFRQ

SEQ ID NO: 5996 - protein, 4 aa, synthetic construct
FPFN

SEQ ID NO: 5997 - protein, 4 aa, synthetic construct
FFGN

SEQ ID NO: 5998 - protein, 4 aa, synthetic construct
MCQN

SEQ ID NO: 5999 - protein, 4 aa, synthetic construct
KLFW

SEQ ID NO: 6000 - protein, 4 aa, synthetic construct
KTRK

SEQ ID NO: 6001 - protein, 4 aa, synthetic construct
GKRN

SEQ ID NO: 6002 - protein, 4 aa, synthetic construct
YRQN

SEQ ID NO: 6003 - protein, 4 aa, synthetic construct
RVQN

SEQ ID NO: 6004 - protein, 4 aa, synthetic construct
GIQN

SEQ ID NO: 6005 - protein, 4 aa, synthetic construct
KAQR

SEQ ID NO: 6006 - protein, 4 aa, synthetic construct
NCQN

SEQ ID NO: 6007 - protein, 4 aa, synthetic construct
KPFR

SEQ ID NO: 6008 - protein, 4 aa, synthetic construct
LAWN

SEQ ID NO: 6009 - protein, 4 aa, synthetic construct
KRSY

SEQ ID NO: 6010 - protein, 4 aa, synthetic construct
SYQN

SEQ ID NO: 6011 - protein, 4 aa, synthetic construct
WLQN

SEQ ID NO: 6012 - protein, 4 aa, synthetic construct
SCQN

SEQ ID NO: 6013 - protein, 4 aa, synthetic construct
SWLN

SEQ ID NO: 6014 - protein, 4 aa, synthetic construct
KRRA

SEQ ID NO: 6015 - protein, 4 aa, synthetic construct
KAQT

SEQ ID NO: 6016 - protein, 4 aa, synthetic construct
KGCT

SEQ ID NO: 6017 - protein, 4 aa, synthetic construct
KRYT

SEQ ID NO: 6018 - protein, 4 aa, synthetic construct
GCQN

SEQ ID NO: 6019 - protein, 4 aa, synthetic construct
FTPN

SEQ ID NO: 6020 - protein, 4 aa, synthetic construct
TTCN

SEQ ID NO: 6021 - protein, 4 aa, synthetic construct
KARM

SEQ ID NO: 6022 - protein, 4 aa, synthetic construct
KRQN

SEQ ID NO: 6023 - protein, 4 aa, synthetic construct
KCFL

SEQ ID NO: 6024 - protein, 4 aa, synthetic construct
VPQN

SEQ ID NO: 6025 - protein, 4 aa, synthetic construct
FWSN

SEQ ID NO: 6026 - protein, 4 aa, synthetic construct
KFKN

SEQ ID NO: 6027 - protein, 4 aa, synthetic construct
IKQN

SEQ ID NO: 6028 - protein, 4 aa, synthetic construct
KAPR

SEQ ID NO: 6029 - protein, 4 aa, synthetic construct
FRYN

SEQ ID NO: 6030 - protein, 4 aa, synthetic construct
KMIC

SEQ ID NO: 6031 - protein, 4 aa, synthetic construct
RWQN

SEQ ID NO: 6032 - protein, 4 aa, synthetic construct
PTQN

SEQ ID NO: 6033 - protein, 4 aa, synthetic construct
KWKS

SEQ ID NO: 6034 - protein, 4 aa, synthetic construct
YMRN

SEQ ID NO: 6035 - protein, 4 aa, synthetic construct
KAAR

SEQ ID NO: 6036 - protein, 4 aa, synthetic construct
LCQN

SEQ ID NO: 6037 - protein, 4 aa, synthetic construct
CCQN

SEQ ID NO: 6038 - protein, 4 aa, synthetic construct
CVQN

SEQ ID NO: 6039 - protein, 4 aa, synthetic construct
KLTR

SEQ ID NO: 6040 - protein, 4 aa, synthetic construct
KLCT

SEQ ID NO: 6041 - protein, 4 aa, synthetic construct
KIRG

SEQ ID NO: 6042 - protein, 4 aa, synthetic construct
YLVN

SEQ ID NO: 6043 - protein, 4 aa, synthetic construct
AFQN

SEQ ID NO: 6044 - protein, 4 aa, synthetic construct
KACQ

SEQ ID NO: 6045 - protein, 4 aa, synthetic construct
KWGL

SEQ ID NO: 6046 - protein, 4 aa, synthetic construct
KILR

SEQ ID NO: 6047 - protein, 4 aa, synthetic construct
FQIN

SEQ ID NO: 6048 - protein, 4 aa, synthetic construct
KACI

SEQ ID NO: 6049 - protein, 4 aa, synthetic construct
KALR

SEQ ID NO: 6050 - protein, 4 aa, synthetic construct
KAHA

SEQ ID NO: 6051 - protein, 4 aa, synthetic construct
LCLN

SEQ ID NO: 6052 - protein, 4 aa, synthetic construct
KAFV

SEQ ID NO: 6053 - protein, 4 aa, synthetic construct
PRQN

SEQ ID NO: 6054 - protein, 4 aa, synthetic construct
CPQN

SEQ ID NO: 6055 - protein, 4 aa, synthetic construct
KAQF

SEQ ID NO: 6056 - protein, 4 aa, synthetic construct
VRYN

SEQ ID NO: 6057 - protein, 4 aa, synthetic construct
VRCN

SEQ ID NO: 6058 - protein, 4 aa, synthetic construct
KMPC

SEQ ID NO: 6059 - protein, 4 aa, synthetic construct
KKTS

SEQ ID NO: 6060 - protein, 4 aa, synthetic construct
LPYN

SEQ ID NO: 6061 - protein, 4 aa, synthetic construct
YHQN

SEQ ID NO: 6062 - protein, 4 aa, synthetic construct
KAQS

SEQ ID NO: 6063 - protein, 4 aa, synthetic construct
YTRN

SEQ ID NO: 6064 - protein, 4 aa, synthetic construct
VYQN

SEQ ID NO: 6065 - protein, 4 aa, synthetic construct
RYQN

SEQ ID NO: 6066 - protein, 4 aa, synthetic construct
WLKN

SEQ ID NO: 6067 - protein, 4 aa, synthetic construct
KAQM

SEQ ID NO: 6068 - protein, 4 aa, synthetic construct
PAQN

SEQ ID NO: 6069 - protein, 4 aa, synthetic construct
MCTN

SEQ ID NO: 6070 - protein, 4 aa, synthetic construct
PPDN

SEQ ID NO: 6071 - protein, 4 aa, synthetic construct
KRNY

SEQ ID NO: 6072 - protein, 4 aa, synthetic construct
WTQN

SEQ ID NO: 6073 - protein, 4 aa, synthetic construct
KACR

SEQ ID NO: 6074 - protein, 4 aa, synthetic construct
RKQN

SEQ ID NO: 6075 - protein, 4 aa, synthetic construct
KCSV

SEQ ID NO: 6076 - protein, 4 aa, synthetic construct
KARI

SEQ ID NO: 6077 - protein, 4 aa, synthetic construct
FVQN

SEQ ID NO: 6078 - protein, 4 aa, synthetic construct
KLPK

SEQ ID NO: 6079 - protein, 4 aa, synthetic construct
KSEQ

SEQ ID NO: 6080 - protein, 4 aa, synthetic construct
VAQN

SEQ ID NO: 6081 - protein, 4 aa, synthetic construct
LYQN

SEQ ID NO: 6082 - protein, 4 aa, synthetic construct
KVRM

SEQ ID NO: 6083 - protein, 4 aa, synthetic construct
ALQN

SEQ ID NO: 6084 - protein, 4 aa, synthetic construct
SCTN

SEQ ID NO: 6085 - protein, 4 aa, synthetic construct
KNSR

SEQ ID NO: 6086 - protein, 4 aa, synthetic construct
KRKR

SEQ ID NO: 6087 - protein, 4 aa, synthetic construct
CTQN

SEQ ID NO: 6088 - protein, 4 aa, synthetic construct
TCLN

SEQ ID NO: 6089 - protein, 4 aa, synthetic construct
YARN

SEQ ID NO: 6090 - protein, 4 aa, synthetic construct
KQRP

SEQ ID NO: 6091 - protein, 4 aa, synthetic construct
KRVV

SEQ ID NO: 6092 - protein, 4 aa, synthetic construct
SGQN

SEQ ID NO: 6093 - protein, 4 aa, synthetic construct
YYSN

SEQ ID NO: 6094 - protein, 4 aa, synthetic construct
LTCN

SEQ ID NO: 6095 - protein, 4 aa, synthetic construct
CQSN

SEQ ID NO: 6096 - protein, 4 aa, synthetic construct
KAKG

SEQ ID NO: 6097 - protein, 4 aa, synthetic construct
KPQN

SEQ ID NO: 6098 - protein, 4 aa, synthetic construct
PFQN

SEQ ID NO: 6099 - protein, 4 aa, synthetic construct
KCTS

SEQ ID NO: 6100 - protein, 4 aa, synthetic construct
VFEN

SEQ ID NO: 6101 - protein, 4 aa, synthetic construct
KAKK

SEQ ID NO: 6102 - protein, 5 aa, synthetic construct
SKAQA

SEQ ID NO: 6103 - protein, 5 aa, synthetic construct
SKAQN

SEQ ID NO: 6104 - protein, 5 aa, synthetic construct
SMYMN

SEQ ID NO: 6105 - protein, 5 aa, synthetic construct
SKAFY

SEQ ID NO: 6106 - protein, 5 aa, synthetic construct
SKLKR

SEQ ID NO: 6107 - protein, 5 aa, synthetic construct
SKRHR

SEQ ID NO: 6108 - protein, 5 aa, synthetic construct
SKAQK

SEQ ID NO: 6109 - protein, 5 aa, synthetic construct
SKWRL

SEQ ID NO: 6110 - protein, 5 aa, synthetic construct
SRCRN

SEQ ID NO: 6111 - protein, 5 aa, synthetic construct
SFTCN

SEQ ID NO: 6112 - protein, 5 aa, synthetic construct
SKFFI

SEQ ID NO: 6113 - protein, 5 aa, synthetic construct
SKAQY

SEQ ID NO: 6114 - protein, 5 aa, synthetic construct
IVWQN

SEQ ID NO: 6115 - protein, 5 aa, synthetic construct
SKYFM

SEQ ID NO: 6116 - protein, 5 aa, synthetic construct
SKARQ

SEQ ID NO: 6117 - protein, 5 aa, synthetic construct
SCHQN

SEQ ID NO: 6118 - protein, 5 aa, synthetic construct
FPWQN

SEQ ID NO: 6119 - protein, 5 aa, synthetic construct
SKIRR

SEQ ID NO: 6120 - protein, 5 aa, synthetic construct
VYYQN

SEQ ID NO: 6121 - protein, 5 aa, synthetic construct
SLYWN

SEQ ID NO: 6122 - protein, 5 aa, synthetic construct
SKPKR

SEQ ID NO: 6123 - protein, 5 aa, synthetic construct
SKAFS

SEQ ID NO: 6124 - protein, 5 aa, synthetic construct
SRFWN

SEQ ID NO: 6125 - protein, 5 aa, synthetic construct
SKAQC

SEQ ID NO: 6126 - protein, 5 aa, synthetic construct
SRMRN

SEQ ID NO: 6127 - protein, 5 aa, synthetic construct
SVKKN

SEQ ID NO: 6128 - protein, 5 aa, synthetic construct
SWAPN

SEQ ID NO: 6129 - protein, 5 aa, synthetic construct
SLWKN

SEQ ID NO: 6130 - protein, 5 aa, synthetic construct
SKARW

SEQ ID NO: 6131 - protein, 5 aa, synthetic construct
SFRPN

SEQ ID NO: 6132 - protein, 5 aa, synthetic construct
SKKVF

SEQ ID NO: 6133 - protein, 5 aa, synthetic construct
SYAFN

SEQ ID NO: 6134 - protein, 5 aa, synthetic construct
SKACS

SEQ ID NO: 6135 - protein, 5 aa, synthetic construct
SKRLW

SEQ ID NO: 6136 - protein, 5 aa, synthetic construct
SCSRN

SEQ ID NO: 6137 - protein, 5 aa, synthetic construct
SRCPN

SEQ ID NO: 6138 - protein, 5 aa, synthetic construct
SGACN

SEQ ID NO: 6139 - protein, 5 aa, synthetic construct
SKFRQ

SEQ ID NO: 6140 - protein, 5 aa, synthetic construct
SFPFN

SEQ ID NO: 6141 - protein, 5 aa, synthetic construct
SFFGN

SEQ ID NO: 6142 - protein, 5 aa, synthetic construct
SMCQN

SEQ ID NO: 6143 - protein, 5 aa, synthetic construct
SKLFW

SEQ ID NO: 6144 - protein, 5 aa, synthetic construct
SKTRK

SEQ ID NO: 6145 - protein, 5 aa, synthetic construct
SGKRN

SEQ ID NO: 6146 - protein, 5 aa, synthetic construct
FYRQN

SEQ ID NO: 6147 - protein, 5 aa, synthetic construct
CRVQN

SEQ ID NO: 6148 - protein, 5 aa, synthetic construct
YGIQN

SEQ ID NO: 6149 - protein, 5 aa, synthetic construct
SKAQR

SEQ ID NO: 6150 - protein, 5 aa, synthetic construct
VNCQN

SEQ ID NO: 6151 - protein, 5 aa, synthetic construct
SKPFR

SEQ ID NO: 6152 - protein, 5 aa, synthetic construct
SLAWN

SEQ ID NO: 6153 - protein, 5 aa, synthetic construct
SKRSY

SEQ ID NO: 6154 - protein, 5 aa, synthetic construct
WSYQN

SEQ ID NO: 6155 - protein, 5 aa, synthetic construct
RWLQN

SEQ ID NO: 6156 - protein, 5 aa, synthetic construct
PSCQN

SEQ ID NO: 6157 - protein, 5 aa, synthetic construct
SSWLN

SEQ ID NO: 6158 - protein, 5 aa, synthetic construct
SKRRA

SEQ ID NO: 6159 - protein, 5 aa, synthetic construct
SKAQT

SEQ ID NO: 6160 - protein, 5 aa, synthetic construct
SKGCT

SEQ ID NO: 6161 - protein, 5 aa, synthetic construct
VPWQN

SEQ ID NO: 6162 - protein, 5 aa, synthetic construct
SKRYT

SEQ ID NO: 6163 - protein, 5 aa, synthetic construct
SGCQN

SEQ ID NO: 6164 - protein, 5 aa, synthetic construct
SFTPN

SEQ ID NO: 6165 - protein, 5 aa, synthetic construct
STTCN

SEQ ID NO: 6166 - protein, 5 aa, synthetic construct
SKARM

SEQ ID NO: 6167 - protein, 5 aa, synthetic construct
PKRQN

SEQ ID NO: 6168 - protein, 5 aa, synthetic construct
SKCFL

SEQ ID NO: 6169 - protein, 5 aa, synthetic construct
WVPQN

SEQ ID NO: 6170 - protein, 5 aa, synthetic construct
SFWSN

SEQ ID NO: 6171 - protein, 5 aa, synthetic construct
SKFKN

SEQ ID NO: 6172 - protein, 5 aa, synthetic construct
RIKQN

SEQ ID NO: 6173 - protein, 5 aa, synthetic construct
SKAPR

SEQ ID NO: 6174 - protein, 5 aa, synthetic construct
SFRYN

SEQ ID NO: 6175 - protein, 5 aa, synthetic construct
SKMIC

SEQ ID NO: 6176 - protein, 5 aa, synthetic construct
LRWQN

SEQ ID NO: 6177 - protein, 5 aa, synthetic construct
LPTQN

SEQ ID NO: 6178 - protein, 5 aa, synthetic construct
SKWKS

SEQ ID NO: 6179 - protein, 5 aa, synthetic construct
SYMRN

SEQ ID NO: 6180 - protein, 5 aa, synthetic construct
SKAAR

SEQ ID NO: 6181 - protein, 5 aa, synthetic construct
LLCQN

SEQ ID NO: 6182 - protein, 5 aa, synthetic construct
RCCQN

SEQ ID NO: 6183 - protein, 5 aa, synthetic construct
LCVQN

SEQ ID NO: 6184 - protein, 5 aa, synthetic construct
SKLTR

SEQ ID NO: 6185 - protein, 5 aa, synthetic construct
SKLCT

SEQ ID NO: 6186 - protein, 5 aa, synthetic construct
SKIRG

SEQ ID NO: 6187 - protein, 5 aa, synthetic construct
SYLVN

SEQ ID NO: 6188 - protein, 5 aa, synthetic construct
QGCQN

SEQ ID NO: 6189 - protein, 5 aa, synthetic construct
MAFQN

SEQ ID NO: 6190 - protein, 5 aa, synthetic construct
SKACQ

SEQ ID NO: 6191 - protein, 5 aa, synthetic construct
SKWGL

SEQ ID NO: 6192 - protein, 5 aa, synthetic construct
SKILR

SEQ ID NO: 6193 - protein, 5 aa, synthetic construct
SFQIN

SEQ ID NO: 6194 - protein, 5 aa, synthetic construct
SKACI

SEQ ID NO: 6195 - protein, 5 aa, synthetic construct
SKALR

SEQ ID NO: 6196 - protein, 5 aa, synthetic construct
SKAHA

SEQ ID NO: 6197 - protein, 5 aa, synthetic construct
SLCLN

SEQ ID NO: 6198 - protein, 5 aa, synthetic construct
SKAFV

SEQ ID NO: 6199 - protein, 5 aa, synthetic construct
RPWQN

SEQ ID NO: 6200 - protein, 5 aa, synthetic construct
RPRQN

SEQ ID NO: 6201 - protein, 5 aa, synthetic construct
SCPQN

SEQ ID NO: 6202 - protein, 5 aa, synthetic construct
SKAQF

SEQ ID NO: 6203 - protein, 5 aa, synthetic construct
SVRYN

SEQ ID NO: 6204 - protein, 5 aa, synthetic construct
SVRCN

SEQ ID NO: 6205 - protein, 5 aa, synthetic construct
SKMPC

SEQ ID NO: 6206 - protein, 5 aa, synthetic construct
SKKTS

SEQ ID NO: 6207 - protein, 5 aa, synthetic construct
SLPYN

SEQ ID NO: 6208 - protein, 5 aa, synthetic construct
VYHQN

SEQ ID NO: 6209 - protein, 5 aa, synthetic construct
SKAQS

SEQ ID NO: 6210 - protein, 5 aa, synthetic construct
SYTRN

SEQ ID NO: 6211 - protein, 5 aa, synthetic construct
LVYQN

SEQ ID NO: 6212 - protein, 5 aa, synthetic construct
YRYQN

SEQ ID NO: 6213 - protein, 5 aa, synthetic construct
SWLKN

SEQ ID NO: 6214 - protein, 5 aa, synthetic construct
SKAQM

SEQ ID NO: 6215 - protein, 5 aa, synthetic construct
CPAQN

SEQ ID NO: 6216 - protein, 5 aa, synthetic construct
SMCTN

SEQ ID NO: 6217 - protein, 5 aa, synthetic construct
SPPDN

SEQ ID NO: 6218 - protein, 5 aa, synthetic construct
SKRNY

SEQ ID NO: 6219 - protein, 5 aa, synthetic construct
RWTQN

SEQ ID NO: 6220 - protein, 5 aa, synthetic construct
SKACR

SEQ ID NO: 6221 - protein, 5 aa, synthetic construct
PRKQN

SEQ ID NO: 6222 - protein, 5 aa, synthetic construct
SKCSV

SEQ ID NO: 6223 - protein, 5 aa, synthetic construct
SKARI

SEQ ID NO: 6224 - protein, 5 aa, synthetic construct
PFVQN

SEQ ID NO: 6225 - protein, 5 aa, synthetic construct
SKLPK

SEQ ID NO: 6226 - protein, 5 aa, synthetic construct
SKSEQ

SEQ ID NO: 6227 - protein, 5 aa, synthetic construct
WVAQN

SEQ ID NO: 6228 - protein, 5 aa, synthetic construct
SLYQN

SEQ ID NO: 6229 - protein, 5 aa, synthetic construct
SKVRM

SEQ ID NO: 6230 - protein, 5 aa, synthetic construct
CALQN

SEQ ID NO: 6231 - protein, 5 aa, synthetic construct
SSCTN

SEQ ID NO: 6232 - protein, 5 aa, synthetic construct
SKNSR

SEQ ID NO: 6233 - protein, 5 aa, synthetic construct
SKRKR

SEQ ID NO: 6234 - protein, 5 aa, synthetic construct
LCTQN

SEQ ID NO: 6235 - protein, 5 aa, synthetic construct
STCLN

SEQ ID NO: 6236 - protein, 5 aa, synthetic construct
SYARN

SEQ ID NO: 6237 - protein, 5 aa, synthetic construct
SKQRP

SEQ ID NO: 6238 - protein, 5 aa, synthetic construct
SKRVV

SEQ ID NO: 6239 - protein, 5 aa, synthetic construct
KSGQN

SEQ ID NO: 6240 - protein, 5 aa, synthetic construct
SYYSN

SEQ ID NO: 6241 - protein, 5 aa, synthetic construct
SLTCN

SEQ ID NO: 6242 - protein, 5 aa, synthetic construct
SCQSN

SEQ ID NO: 6243 - protein, 5 aa, synthetic construct
SKAKG

SEQ ID NO: 6244 - protein, 5 aa, synthetic construct
SKPQN

SEQ ID NO: 6245 - protein, 5 aa, synthetic construct
FPFQN

SEQ ID NO: 6246 - protein, 5 aa, synthetic construct
SKCTS

SEQ ID NO: 6247 - protein, 5 aa, synthetic construct
SVFEN

SEQ ID NO: 6248 - protein, 5 aa, synthetic construct
SKAKK

SEQ ID NO: 6249 - protein, 5 aa, synthetic construct
GRYQN

SEQ ID NO: 6250 - protein, 11 aa, synthetic construct
GSGSPHSKAQA

SEQ ID NO: 6251 - protein, 11 aa, synthetic construct
GSGSPHSKAQN

SEQ ID NO: 6252 - protein, 11 aa, synthetic construct
GSGSPHSMYMN

SEQ ID NO: 6253 - protein, 11 aa, synthetic construct
GSGSPHSKAFY

SEQ ID NO: 6254 - protein, 11 aa, synthetic construct
GSGSPHSKLKR

SEQ ID NO: 6255 - protein, 11 aa, synthetic construct
GSGSPHSKRHR

SEQ ID NO: 6256 - protein, 11 aa, synthetic construct
GSGSPHSKAQK

SEQ ID NO: 6257 - protein, 11 aa, synthetic construct
GSGSPHSKWRL

SEQ ID NO: 6258 - protein, 11 aa, synthetic construct
GSGSPHSRCRN

SEQ ID NO: 6259 - protein, 11 aa, synthetic construct
GSGSPHSFTCN

SEQ ID NO: 6260 - protein, 11 aa, synthetic construct
GSGSPHSKFFI

SEQ ID NO: 6261 - protein, 11 aa, synthetic construct
GSGSPHSKAQY

SEQ ID NO: 6262 - protein, 11 aa, synthetic construct
GSGSPHIVWQN

SEQ ID NO: 6263 - protein, 11 aa, synthetic construct
GSGSPHSKYFM

SEQ ID NO: 6264 - protein, 11 aa, synthetic construct
GSGSPHSKARQ

SEQ ID NO: 6265 - protein, 11 aa, synthetic construct
GSGSPHSCHQN

SEQ ID NO: 6266 - protein, 11 aa, synthetic construct
GSGSPHFPWQN

SEQ ID NO: 6267 - protein, 11 aa, synthetic construct
GSGSPHSKIRR

SEQ ID NO: 6268 - protein, 11 aa, synthetic construct
GSGSPHVYYQN

SEQ ID NO: 6269 - protein, 11 aa, synthetic construct
GSGSPHSLYWN

SEQ ID NO: 6270 - protein, 11 aa, synthetic construct
GSGSPHSKPKR

SEQ ID NO: 6271 - protein, 11 aa, synthetic construct
GSGSPHSKAFS

SEQ ID NO: 6272 - protein, 11 aa, synthetic construct
GSGSPHSRFWN

SEQ ID NO: 6273 - protein, 11 aa, synthetic construct
GSGSPHSKAQC

SEQ ID NO: 6274 - protein, 11 aa, synthetic construct
GSGSPHSRMRN

SEQ ID NO: 6275 - protein, 11 aa, synthetic construct
GSGSPHSVKKN

SEQ ID NO: 6276 - protein, 11 aa, synthetic construct
GSGSPHSWAPN

SEQ ID NO: 6277 - protein, 11 aa, synthetic construct
GSGSPHSLWKN

SEQ ID NO: 6278 - protein, 11 aa, synthetic construct
GSGSPHSKARW

SEQ ID NO: 6279 - protein, 11 aa, synthetic construct
GSGSPHSFRPN

SEQ ID NO: 6280 - protein, 11 aa, synthetic construct
GSGSPHSKKVF

SEQ ID NO: 6281 - protein, 11 aa, synthetic construct
GSGSPHSYAFN

SEQ ID NO: 6282 - protein, 11 aa, synthetic construct
GSGSPHSKACS

SEQ ID NO: 6283 - protein, 11 aa, synthetic construct
GSGSPHSKRLW

SEQ ID NO: 6284 - protein, 11 aa, synthetic construct
GSGSPHSCSRN

SEQ ID NO: 6285 - protein, 11 aa, synthetic construct
GSGSPHSRCPN

SEQ ID NO: 6286 - protein, 11 aa, synthetic construct
GSGSPHSGACN

SEQ ID NO: 6287 - protein, 11 aa, synthetic construct
GSGSPHSKFRQ

SEQ ID NO: 6288 - protein, 11 aa, synthetic construct
GSGSPHSFPFN

SEQ ID NO: 6289 - protein, 11 aa, synthetic construct
GSGSPHSFFGN

SEQ ID NO: 6290 - protein, 11 aa, synthetic construct
GSGSPHSMCQN

SEQ ID NO: 6291 - protein, 11 aa, synthetic construct
GSGSPHSKLFW

SEQ ID NO: 6292 - protein, 11 aa, synthetic construct
GSGSPHSKTRK

SEQ ID NO: 6293 - protein, 11 aa, synthetic construct
GSGSPHSGKRN

SEQ ID NO: 6294 - protein, 11 aa, synthetic construct
GSGSPHFYRQN

SEQ ID NO: 6295 - protein, 11 aa, synthetic construct
GSGSPHCRVQN

SEQ ID NO: 6296 - protein, 11 aa, synthetic construct
GSGSPHYGIQN

SEQ ID NO: 6297 - protein, 11 aa, synthetic construct
GSGSPHSKAQR

SEQ ID NO: 6298 - protein, 11 aa, synthetic construct
GSGSPHVNCQN

SEQ ID NO: 6299 - protein, 11 aa, synthetic construct
GSGSPHSKPFR

SEQ ID NO: 6300 - protein, 11 aa, synthetic construct
GSGSPHSLAWN

SEQ ID NO: 6301 - protein, 11 aa, synthetic construct
GSGSPHSKRSY

SEQ ID NO: 6302 - protein, 11 aa, synthetic construct
GSGSPHWSYQN

SEQ ID NO: 6303 - protein, 11 aa, synthetic construct
GSGSPHRWLQN

SEQ ID NO: 6304 - protein, 11 aa, synthetic construct
GSGSPHPSCQN

SEQ ID NO: 6305 - protein, 11 aa, synthetic construct
GSGSPHSSWLN

SEQ ID NO: 6306 - protein, 11 aa, synthetic construct
GSGSPHSKRRA

SEQ ID NO: 6307 - protein, 11 aa, synthetic construct
GSGSPHSKAQT

SEQ ID NO: 6308 - protein, 11 aa, synthetic construct
GSGSPHSKGCT

SEQ ID NO: 6309 - protein, 11 aa, synthetic construct
GSGSPHVPWQN

SEQ ID NO: 6310 - protein, 11 aa, synthetic construct
GSGSPHSKRYT

SEQ ID NO: 6311 - protein, 11 aa, synthetic construct
GSGSPHSGCQN

SEQ ID NO: 6312 - protein, 11 aa, synthetic construct
GSGSPHSFTPN

SEQ ID NO: 6313 - protein, 11 aa, synthetic construct
GSGSPHSTTCN

SEQ ID NO: 6314 - protein, 11 aa, synthetic construct
GSGSPHSKARM

SEQ ID NO: 6315 - protein, 11 aa, synthetic construct
GSGSPHPKRQN

SEQ ID NO: 6316 - protein, 11 aa, synthetic construct
GSGSPHSKCFL

SEQ ID NO: 6317 - protein, 11 aa, synthetic construct
GSGSPHWVPQN

SEQ ID NO: 6318 - protein, 11 aa, synthetic construct
GSGSPHSFWSN

SEQ ID NO: 6319 - protein, 11 aa, synthetic construct
GSGSPHSKFKN

SEQ ID NO: 6320 - protein, 11 aa, synthetic construct
GSGSPHRIKQN

SEQ ID NO: 6321 - protein, 11 aa, synthetic construct
GSGSPHSKAPR

SEQ ID NO: 6322 - protein, 11 aa, synthetic construct
GSGSPHSFRYN

SEQ ID NO: 6323 - protein, 11 aa, synthetic construct
GSGSPHSKMIC

SEQ ID NO: 6324 - protein, 11 aa, synthetic construct
GSGSPHLRWQN

SEQ ID NO: 6325 - protein, 11 aa, synthetic construct
GSGSPHLPTQN

SEQ ID NO: 6326 - protein, 11 aa, synthetic construct
GSGSPHSKWKS

SEQ ID NO: 6327 - protein, 11 aa, synthetic construct
GSGSPHSYMRN

SEQ ID NO: 6328 - protein, 11 aa, synthetic construct
GSGSPHSKAAR

SEQ ID NO: 6329 - protein, 11 aa, synthetic construct
GSGSPHLLCQN

SEQ ID NO: 6330 - protein, 11 aa, synthetic construct
GSGSPHRCCQN

SEQ ID NO: 6331 - protein, 11 aa, synthetic construct
GSGSPHLCVQN

SEQ ID NO: 6332 - protein, 11 aa, synthetic construct
GSGSPHSKLTR

SEQ ID NO: 6333 - protein, 11 aa, synthetic construct
GSGSPHSKLCT

SEQ ID NO: 6334 - protein, 11 aa, synthetic construct
GSGSPHSKIRG

SEQ ID NO: 6335 - protein, 11 aa, synthetic construct
GSGSPHSYLVN

SEQ ID NO: 6336 - protein, 11 aa, synthetic construct
GSGSPHQGCQN

SEQ ID NO: 6337 - protein, 11 aa, synthetic construct
GSGSPHMAFQN

SEQ ID NO: 6338 - protein, 11 aa, synthetic construct
GSGSPHSKACQ

SEQ ID NO: 6339 - protein, 11 aa, synthetic construct
GSGSPHSKWGL

SEQ ID NO: 6340 - protein, 11 aa, synthetic construct
GSGSPHSKILR

SEQ ID NO: 6341 - protein, 11 aa, synthetic construct
GSGSPHSFQIN

SEQ ID NO: 6342 - protein, 11 aa, synthetic construct
GSGSPHSKACI

SEQ ID NO: 6343 - protein, 11 aa, synthetic construct
GSGSPHSKALR

SEQ ID NO: 6344 - protein, 11 aa, synthetic construct
GSGSPHSKAHA

SEQ ID NO: 6345 - protein, 11 aa, synthetic construct
GSGSPHSLCLN

SEQ ID NO: 6346 - protein, 11 aa, synthetic construct
GSGSPHSKAFV

SEQ ID NO: 6347 - protein, 11 aa, synthetic construct
GSGSPHRPWQN

SEQ ID NO: 6348 - protein, 11 aa, synthetic construct
GSGSPHRPRQN

SEQ ID NO: 6349 - protein, 11 aa, synthetic construct
GSGSPHSCPQN

SEQ ID NO: 6350 - protein, 11 aa, synthetic construct
GSGSPHSKAQF

SEQ ID NO: 6351 - protein, 11 aa, synthetic construct
GSGSPHSVRYN

SEQ ID NO: 6352 - protein, 11 aa, synthetic construct
GSGSPHSVRCN

SEQ ID NO: 6353 - protein, 11 aa, synthetic construct
GSGSPHSKMPC

SEQ ID NO: 6354 - protein, 11 aa, synthetic construct
GSGSPHSKKTS

SEQ ID NO: 6355 - protein, 11 aa, synthetic construct
GSGSPHSLPYN

SEQ ID NO: 6356 - protein, 11 aa, synthetic construct
GSGSPHVYHQN

SEQ ID NO: 6357 - protein, 11 aa, synthetic construct
GSGSPHSKAQS

SEQ ID NO: 6358 - protein, 11 aa, synthetic construct
GSGSPHSYTRN

SEQ ID NO: 6359 - protein, 11 aa, synthetic construct
GSGSPHLVYQN

SEQ ID NO: 6360 - protein, 11 aa, synthetic construct
GSGSPHYRYQN

SEQ ID NO: 6361 - protein, 11 aa, synthetic construct
GSGSPHSWLKN

SEQ ID NO: 6362 - protein, 11 aa, synthetic construct
GSGSPHSKAQM

SEQ ID NO: 6363 - protein, 11 aa, synthetic construct
GSGSPHCPAQN

SEQ ID NO: 6364 - protein, 11 aa, synthetic construct
GSGSPHSMCTN

SEQ ID NO: 6365 - protein, 11 aa, synthetic construct
GSGSPHSPPDN

SEQ ID NO: 6366 - protein, 11 aa, synthetic construct
GSGSPHSKRNY

SEQ ID NO: 6367 - protein, 11 aa, synthetic construct
GSGSPHRWTQN

SEQ ID NO: 6368 - protein, 11 aa, synthetic construct
GSGSPHSKACR

SEQ ID NO: 6369 - protein, 11 aa, synthetic construct
GSGSPHPRKQN

SEQ ID NO: 6370 - protein, 11 aa, synthetic construct
GSGSPHSKCSV

SEQ ID NO: 6371 - protein, 11 aa, synthetic construct
GSGSPHSKARI

SEQ ID NO: 6372 - protein, 11 aa, synthetic construct
GSGSPHPFVQN

SEQ ID NO: 6373 - protein, 11 aa, synthetic construct
GSGSPHSKLPK

SEQ ID NO: 6374 - protein, 11 aa, synthetic construct
GSGSPHSKSEQ

SEQ ID NO: 6375 - protein, 11 aa, synthetic construct
GSGSPHWVAQN

SEQ ID NO: 6376 - protein, 11 aa, synthetic construct
GSGSPHSLYQN

SEQ ID NO: 6377 - protein, 11 aa, synthetic construct
GSGSPHSKVRM

SEQ ID NO: 6378 - protein, 11 aa, synthetic construct
GSGSPHCALQN

SEQ ID NO: 6379 - protein, 11 aa, synthetic construct
GSGSPHSSCTN

SEQ ID NO: 6380 - protein, 11 aa, synthetic construct
GSGSPHSKNSR

SEQ ID NO: 6381 - protein, 11 aa, synthetic construct
GSGSPHSKRKR

SEQ ID NO: 6382 - protein, 11 aa, synthetic construct
GSGSPHLCTQN

SEQ ID NO: 6383 - protein, 11 aa, synthetic construct
GSGSPHSTCLN

SEQ ID NO: 6384 - protein, 11 aa, synthetic construct
GSGSPHSYARN

SEQ ID NO: 6385 - protein, 11 aa, synthetic construct
GSGSPHSKQRP

SEQ ID NO: 6386 - protein, 11 aa, synthetic construct
GSGSPHSKRVV

SEQ ID NO: 6387 - protein, 11 aa, synthetic construct
GSGSPHKSGQN

SEQ ID NO: 6388 - protein, 11 aa, synthetic construct
GSGSPHSYYSN

SEQ ID NO: 6389 - protein, 11 aa, synthetic construct
GSGSPHSLTCN

SEQ ID NO: 6390 - protein, 11 aa, synthetic construct
GSGSPHSCQSN

SEQ ID NO: 6391 - protein, 11 aa, synthetic construct
GSGSPHSKAKG

SEQ ID NO: 6392 - protein, 11 aa, synthetic construct
GSGSPHSKPQN

SEQ ID NO: 6393 - protein, 11 aa, synthetic construct
GSGSPHFPFQN

SEQ ID NO: 6394 - protein, 11 aa, synthetic construct
GSGSPHSKCTS

SEQ ID NO: 6395 - protein, 11 aa, synthetic construct
GSGSPHSVFEN

SEQ ID NO: 6396 - protein, 11 aa, synthetic construct
GSGSPHSKAKK

SEQ ID NO: 6397 - protein, 11 aa, synthetic construct
GSGSPHGRYQN

SEQ ID NO: 6398 - protein, 4 aa, synthetic construct
SPHK

SEQ ID NO: 6399 - protein, 11 aa, synthetic construct
ERVSGSPHSKA

SEQ ID NO: 6400 - protein, 12 aa, synthetic construct
AEIGHDSPHKSG

SEQ ID NO: 6401 - protein, 11 aa, synthetic construct
EKMSGSPHSKA

SEQ ID NO: 6402 - protein, 11 aa, synthetic construct
HDSPHSKAQNL

SEQ ID NO: 6403 - protein, 11 aa, synthetic construct
VNGHDSPHSKA

SEQ ID NO: 6404 - protein, 27 aa, synthetic construct
KTINGSGQNQQTLKFSVAGPSNMAVQG

SEQ ID NO: 6405 - protein, 12 aa, synthetic construct
KTINGSGQNQQT

SEQ ID NO: 6406 - protein, 8 aa, synthetic construct
GSGQNQQT

SEQ ID NO: 6407 - protein, 9 aa, synthetic construct
  VARIANT 1: note = Any amino acid
  VARIANT 7: note = Any amino acid
  VARIANT 9: note = Any amino acid
XSGSPHXKX

SEQ ID NO: 6408 - protein, 9 aa, synthetic construct
  VARIANT 1: note = Any amino acid
  VARIANT 2: note = A, C, D, E, F, G, H, I, K, L, M, N, P, Q, R, T, V, W or Y
  VARIANT 3: note = A, C, D, E, F, H, I, K, L, M, N, P, Q, R, S, T, V, W or Y
  VARIANT 8: note = Any amino acid
  VARIANT 9: note = Any amino acid
XXXSPHKXX

SEQ ID NO: 6409-6412 - skipped (4 entries)

SEQ ID NO: 6413 - protein, 960 aa, Homo sapiens
MKIPNIGNVMNKFEILGVVGEGAYGVVLKCRHKETHEIVAIKKFKDSEENEEVKETTLRELKMLRTLKQENIVELKEAFRRRGKLYLVFEYVEKNMLELLEEMPNGVPPEKVKSYIYQLIKAIHWCHKNDIVHRDIKPENLLISHNDVLKLCDFGFARNLSEGNNANYTEYVATRWYRSPELLLGAPYGKSVDMWSVGCILGELSDGQPLFPGESEIDQLFTIQKVLGPLPSEQMKLFYSNPRFHGLRFPAVNHPQSLERRYLGILNSVLLDLMKNLLKLDPADRYLTEQCLNHPTFQTQRLLDRSPSRSAKRKPYHVESSTLSNRNQAGKSTALQSHHRSNSKDIQNLSVGLPRADEGLPANESFLNGNLAGASLSPLHTKTYQASSQPGSTSKDLTNNNIPHLLSPKEAKSKTEFDFNIDPKPSEGPGTKYLKSNSRSQQNRHSFMESSQSKAGTLQPNEKQSRHSYIDTIPQSSRSPSYRTKAKSHGALSDSKSVSNLSEARAQIAEPSTSRYFPSSCLDLNSPTSPTPTRHSDTRTLLSPSGRNNRNEGTLDSRRTTTRHSKTMEELKLPEHMDSSHSHSLSAPHESFSYGLGYTSPFSSQQRPHRHSMYVTRDKVRAKGLDGSLSIGQGMAARANSLQLLSPQPGEQLPPEMTVARSSVKETSREGTSSFHTRQKSEGGVYHDPHSDDGTAPKENRHLYNDPVPRRVGSFYRVPSPRPDNSFHENNVSTRVSSLPSESSSGTNHSKRQPAFDPWKSPENISHSEQLKEKEKQGFFRSMKKKKKKSQTVPNSDSPDLLTLQKSIHSASTPSSRPKEWRPEKISDLQTQSQPLKSLRKLLHLSSASNHPASSDPRFQPLTAQQTKNSFSEIRIHPLSQASGGSSNIRQEPAPKGRPALQLPGQMDPGWHVSSVTRSATEGPSYSEQLGAKSGPNGHPYNRTNRSRMPNLNDLKETAL

SEQ ID NO: 6414 - DNA, 2880 bp, Homo sapiens
  source 1..2880: mol_type = genomic DNA
atgaagattcctaacattggtaatgtgatgaataaatttgagatccttggggttgtaggtgaaggagcctatggagttgtacttaaatgcagacacaaggaaacacatgaaattgtggcgatcaagaaattcaaggacagtgaagaaaatgaagaagtcaaagaaacgactttacgagagcttaaaatgcttcggactctcaagcaggaaaacattgtggagttgaaggaagcatttcgtcggaggggaaagttgtacttggtgtttgagtatgttgaaaaaaatatgctcgaattgctggaagaaatgccaaatggagttccacctgagaaagtaaaaagctacatctatcagctaatcaaggctattcactggtgccataagaatgatattgtccatcgagatataaaaccagaaaatctcttaatcagccacaatgatgtcctaaaactgtgtgactttggttttgctcgtaatctgtcagaaggcaataatgctaattacacagagtacgttgccaccagatggtatcggtccccagaactcttacttggcgctccctatggaaagtccgtggacatgtggtcggtgggctgtattcttggggagcttagcgatggacagcctttatttcctggagaaagtgaaattgaccaactttttactattcagaaggtgctaggaccacttccatctgagcagatgaagcttttctacagtaatcctcgcttccatgggctccggtttccagctgttaaccatcctcagtccttggaaagaagataccttggaattttgaatagtgttctacttgacctaatgaagaatttactgaagttggacccagctgacagatacttgacagaacagtgtttgaatcaccctacatttcaaacccagagacttctggatcgttctccttcaaggtcagcaaaaagaaaaccttaccatgtggaaagcagcacattgtctaatagaaaccaagccggcaaaagtactgctttgcagtctcaccacagatctaacagcaaggacatccagaacctgagtgtaggcctgccccgggctgacgaaggtctccctgccaatgaaagcttcctaaatggaaaccttgctggagctagtcttagtccactgcacaccaaaacctaccaagcaagcagccagcctgggtctaccagcaaagatctcaccaacaacaacataccacaccttcttagcccaaaagaagccaagtcaaaaacagagtttgattttaatattgacccaaagccttcagaaggcccagggacaaagtacctcaagtcaaacagcagatctcagcagaaccgccactcattcatggaaagctctcaaagcaaagctgggacactgcagcccaatgaaaagcagagtcggcatagctatattgacacaattccccagtcctctaggagtccctcctacaggaccaaggccaaaagccatggggcactgagtgactccaagtctgtgagcaacctttctgaagccagggcccaaattgcggagcccagtaccagtaggtacttcccatctagctgcttagacttgaattctcccaccagcccaacccccaccagacacagtgacacgagaactttgctcagcccttctggaagaaataaccgaaatgagggaacgctggactcacgtcgaaccacaaccagacattctaagacgatggaggaattgaagctgccggagcacatggacagtagccattcccattcactgtctgcacctcacgaatctttttcttatggactgggctacaccagccccttttcttcccagcaacgtcctcataggcattctatgtatgtgacccgtgacaaagtgagagccaagggcttggatggaagcttgagcatagggcaagggatggcagctagagccaacagcctgcaactcttgtcaccccagcctggagaacagctccctccagagatgactgtggcaagatcttcggtcaaagagacctccagagaaggcacctcttccttccatacacgccagaagtctgagggtggagtgtatcatgacccacactctgatgatggcacagcccccaaagaaaatagacacctatacaatgatcctgtgccaaggagagttggtagcttttacagagtgccatctccacgtccagacaattctttccatgaaaataatgtgtcaactagagtttcttctctaccatcagagagcagttctggaaccaaccactcaaaaagacaaccagcattcgatccatggaaaagtcctgaaaatattagtcattcagagcaactcaaggaaaaagagaagcaaggatttttcaggtcaatgaaaaagaaaaagaagaaatctcaaacagtacccaattccgacagccctgatcttctgacgttgcagaaatccattcattctgctagcactccaagcagcagaccaaaggagtggcgccccgagaagatctcagatctgcagacccaaagccagccattaaaatcactgcgcaagttgttacatctctcttcggcctcaaatcacccggcttcctcagatccccgcttccagcccttaacagctcaacaaaccaaaaattccttctcagaaattcggattcaccccctgagccaggcctctggcgggagcagcaacatccggcaggaacccgcaccgaagggcaggccagccctccagctgccaggtcagatggatcctggttggcatgtgtcctctgtgaccaggagtgccacagagggcccttcctactctgaacagctgggtgccaaaagtgggccaaatgggcacccctataacagaacaaatcgctcacgaatgccaaatctgaatgatttaaaagagacagccttg

SEQ ID NO: 6415 - protein, 1030 aa, Homo sapiens
MKIPNIGNVMNKFEILGVVGEGAYGVVLKCRHKETHEIVAIKKFKDSEENEEVKETTLRELKMLRTLKQENIVELKEAFRRRGKLYLVFEYVEKNMLELLEEMPNGVPPEKVKSYIYQLIKAIHWCHKNDIVHRDIKPENLLISHNDVLKLCDFGFARNLSEGNNANYTEYVATRWYRSPELLLGAPYGKSVDMWSVGCILGELSDGQPLFPGESEIDQLFTIQKVLGPLPSEQMKLFYSNPRFHGLRFPAVNHPQSLERRYLGILNSVLLDLMKNLLKLDPADRYLTEQCLNHPTFQTQRLLDRSPSRSAKRKPYHVESSTLSNRNQAGKSTALQSHHRSNSKDIQNLSVGLPRADEGLPANESFLNGNLAGASLSPLHTKTYQASSQPGSTSKDLTNNNIPHLLSPKEAKSKTEFDFNIDPKPSEGPGTKYLKSNSRSQQNRHSFMESSQSKAGTLQPNEKQSRHSYIDTIPQSSRSPSYRTKAKSHGALSDSKSVSNLSEARAQIAEPSTSRYFPSSCLDLNSPTSPTPTRHSDTRTLLSPSGRNNRNEGTLDSRRTTTRHSKTMEELKLPEHMDSSHSHSLSAPHESFSYGLGYTSPFSSQQRPHRHSMYVTRDKVRAKGLDGSLSIGQGMAARANSLQLLSPQPGEQLPPEMTVARSSVKETSREGTSSFHTRQKSEGGVYHDPHSDDGTAPKENRHLYNDPVPRRVGSFYRVPSPRPDNSFHENNVSTRVSSLPSESSSGTNHSKRQPAFDPWKSPENISHSEQLKEKEKQGFFRSMKKKKKKSQTVPNSDSPDLLTLQKSIHSASTPSSRPKEWRPEKISDLQTQSQPLKSLRKLLHLSSASNHPASSDPRFQPLTAQQTKNSFSEIRIHPLSQASGGSSNIRQEPAPKGRPALQLPDGGCDGRRQRHHSGPQDRRFMLRTTEQQGEYFCCGDPKKPHTPCVPNRALHRPISSPAPYPVLQVRGTSMCPTLQVRGTDAFSCPTQQSGFSFFVRHVMREALIHRAQVNQAALLTYHENAALTGK

SEQ ID NO: 6416 - DNA, 3427 bp, Homo sapiens
  source 1..3427: mol_type = genomic DNA
gggggagttggaggaggaagaccctacaggaagttgagctgtactctccaacaggcgagcacatggtcgtctcctctctcccttcagggagtcatttaatacttcatgattagaacaaatatgtgaaagttcccaccaaccagtgagaatttcttccttcagacggttttggatcttactgcacagctttctgagaagttcttttggtgccatgttttgtggcttgcatcaaaagaggagtttgtcttcatgaagattcctaacattggtaatgtgatgaataaatttgagatccttggggttgtaggtgaaggagcctatggagttgtacttaaatgcagacacaaggaaacacatgaaattgtggcgatcaagaaattcaaggacagtgaagaaaatgaagaagtcaaagaaacgactttacgagagcttaaaatgcttcggactctcaagcaggaaaacattgtggagttgaaggaagcatttcgtcggaggggaaagttgtacttggtgtttgagtatgttgaaaaaaatatgctcgaattgctggaagaaatgccaaatggagttccacctgagaaagtaaaaagctacatctatcagctaatcaaggctattcactggtgccataagaatgatattgtccatcgagatataaaaccagaaaatctcttaatcagccacaatgatgtcctaaaactgtgtgactttggttttgctcgtaatctgtcagaaggcaataatgctaattacacagagtacgttgccaccagatggtatcggtccccagaactcttacttggcgctccctatggaaagtccgtggacatgtggtcggtgggctgtattcttggggagcttagcgatggacagcctttatttcctggagaaagtgaaattgaccaactttttactattcagaaggtgctaggaccacttccatctgagcagatgaagcttttctacagtaatcctcgcttccatgggctccggtttccagctgttaaccatcctcagtccttggaaagaagataccttggaattttgaatagtgttctacttgacctaatgaagaatttactgaagttggacccagctgacagatacttgacagaacagtgtttgaatcaccctacatttcaaacccagagacttctggatcgttctccttcaaggtcagcaaaaagaaaaccttaccatgtggaaagcagcacattgtctaatagaaaccaagccggcaaaagtactgctttgcagtctcaccacagatctaacagcaaggacatccagaacctgagtgtaggcctgccccgggctgacgaaggtctccctgccaatgaaagcttcctaaatggaaaccttgctggagctagtcttagtccactgcacaccaaaacctaccaagcaagcagccagcctgggtctaccagcaaagatctcaccaacaacaacataccacaccttcttagcccaaaagaagccaagtcaaaaacagagtttgattttaatattgacccaaagccttcagaaggcccagggacaaagtacctcaagtcaaacagcagatctcagcagaaccgccactcattcatggaaagctctcaaagcaaagctgggacactgcagcccaatgaaaagcagagtcggcatagctatattgacacaattccccagtcctctaggagtccctcctacaggaccaaggccaaaagccatggggcactgagtgactccaagtctgtgagcaacctttctgaagccagggcccaaattgcggagcccagtaccagtaggtacttcccatctagctgcttagacttgaattctcccaccagcccaacccccaccagacacagtgacacgagaactttgctcagcccttctggaagaaataaccgaaatgagggaacgctggactcacgtcgaaccacaaccagacattctaagacgatggaggaattgaagctgccggagcacatggacagtagccattcccattcactgtctgcacctcacgaatctttttcttatggactgggctacaccagccccttttcttcccagcaacgtcctcataggcattctatgtatgtgacccgtgacaaagtgagagccaagggcttggatggaagcttgagcatagggcaagggatggcagctagagccaacagcctgcaactcttgtcaccccagcctggagaacagctccctccagagatgactgtggcaagatcttcggtcaaagagacctccagagaaggcacctcttccttccatacacgccagaagtctgagggtggagtgtatcatgacccacactctgatgatggcacagcccccaaagaaaatagacacctatacaatgatcctgtgccaaggagagttggtagcttttacagagtgccatctccacgtccagacaattctttccatgaaaataatgtgtcaactagagtttcttctctaccatcagagagcagttctggaaccaaccactcaaaaagacaaccagcattcgatccatggaaaagtcctgaaaatattagtcattcagagcaactcaaggaaaaagagaagcaaggatttttcaggtcaatgaaaaagaaaaagaagaaatctcaaacagtacccaattccgacagccctgatcttctgacgttgcagaaatccattcattctgctagcactccaagcagcagaccaaaggagtggcgccccgagaagatctcagatctgcagacccaaagccagccattaaaatcactgcgcaagttgttacatctctcttcggcctcaaatcacccggcttcctcagatccccgcttccagcccttaacagctcaacaaaccaaaaattccttctcagaaattcggattcaccccctgagccaggcctctggcgggagcagcaacatccggcaggaacccgcaccgaagggcaggccagccctccagctgccagacggtggatgtgatggcagaagacagagacaccattctggaccccaagatagacgcttcatgttaaggacgacagaacaacaaggagaatacttctgctgtggtgacccaaagaagcctcacactccgtgcgtcccaaaccgagcccttcatcgtccaatctccagtcctgctccctatccagtactccaggtccgaggcacttccatgtgcccgacactccaggtccgaggcactgatgctttcagctgcccaacccagcaatccgggttctctttcttcgtgagacacgttatgagggaagccctgattcacagggcccaggtaaaccaagctgcgctcctgacataccatgagaatgcggcactgacgggcaagtgacttctgcaagcctgcggctggtcccaatgccctgaatcacctctctcatggaagaaccaattaacaccaatgaatcaaccattaa

SEQ ID NO: 6417 - protein, 1030 aa, Homo sapiens; identical to SEQ ID NO: 6415

SEQ ID NO: 6418 - DNA, 3428 bp, Homo sapiens
  source 1..3428: mol_type = genomic DNA
agttgtctctgccgctggggaaggtaaagcggcgacggcgtcctcaggagctgtggggtcccctgctagaagtgggggactcggcgggggagtcatttaatacttcatgattagaacaaatatgtgaaagttcccaccaaccagtgagaatttcttccttcagacggttttggatcttactgcacagctttctgagaagttcttttggtgccatgttttgtggcttgcatcaaaagaggagtttgtcttcatgaagattcctaacattggtaatgtgatgaataaatttgagatccttggggttgtaggtgaaggagcctatggagttgtacttaaatgcagacacaaggaaacacatgaaattgtggcgatcaagaaattcaaggacagtgaagaaaatgaagaagtcaaagaaacgactttacgagagcttaaaatgcttcggactctcaagcaggaaaacattgtggagttgaaggaagcatttcgtcggaggggaaagttgtacttggtgtttgagtatgttgaaaaaaatatgctcgaattgctggaagaaatgccaaatggagttccacctgagaaagtaaaaagctacatctatcagctaatcaaggctattcactggtgccataagaatgatattgtccatcgagatataaaaccagaaaatctcttaatcagccacaatgatgtcctaaaactgtgtgactttggttttgctcgtaatctgtcagaaggcaataatgctaattacacagagtacgttgccaccagatggtatcggtccccagaactcttacttggcgctccctatggaaagtccgtggacatgtggtcggtgggctgtattcttggggagcttagcgatggacagcctttatttcctggagaaagtgaaattgaccaactttttactattcagaaggtgctaggaccacttccatctgagcagatgaagcttttctacagtaatcctcgcttccatgggctccggtttccagctgttaaccatcctcagtccttggaaagaagataccttggaattttgaatagtgttctacttgacctaatgaagaatttactgaagttggacccagctgacagatacttgacagaacagtgtttgaatcaccctacatttcaaacccagagacttctggatcgttctccttcaaggtcagcaaaaagaaaaccttaccatgtggaaagcagcacattgtctaatagaaaccaagccggcaaaagtactgctttgcagtctcaccacagatctaacagcaaggacatccagaacctgagtgtaggcctgccccgggctgacgaaggtctccctgccaatgaaagcttcctaaatggaaaccttgctggagctagtcttagtccactgcacaccaaaacctaccaagcaagcagccagcctgggtctaccagcaaagatctcaccaacaacaacataccacaccttcttagcccaaaagaagccaagtcaaaaacagagtttgattttaatattgacccaaagccttcagaaggcccagggacaaagtacctcaagtcaaacagcagatctcagcagaaccgccactcattcatggaaagctctcaaagcaaagctgggacactgcagcccaatgaaaagcagagtcggcatagctatattgacacaattccccagtcctctaggagtccctcctacaggaccaaggccaaaagccatggggcactgagtgactccaagtctgtgagcaacctttctgaagccagggcccaaattgcggagcccagtaccagtaggtacttcccatctagctgcttagacttgaattctcccaccagcccaacccccaccagacacagtgacacgagaactttgctcagcccttctggaagaaataaccgaaatgagggaacgctggactcacgtcgaaccacaaccagacattctaagacgatggaggaattgaagctgccggagcacatggacagtagccattcccattcactgtctgcacctcacgaatctttttcttatggactgggctacaccagccccttttcttcccagcaacgtcctcataggcattctatgtatgtgacccgtgacaaagtgagagccaagggcttggatggaagcttgagcatagggcaagggatggcagctagagccaacagcctgcaactcttgtcaccccagcctggagaacagctccctccagagatgactgtggcaagatcttcggtcaaagagacctccagagaaggcacctcttccttccatacacgccagaagtctgagggtggagtgtatcatgacccacactctgatgatggcacagcccccaaagaaaatagacacctatacaatgatcctgtgccaaggagagttggtagcttttacagagtgccatctccacgtccagacaattctttccatgaaaataatgtgtcaactagagtttcttctctaccatcagagagcagttctggaaccaaccactcaaaaagacaaccagcattcgatccatggaaaagtcctgaaaatattagtcattcagagcaactcaaggaaaaagagaagcaaggatttttcaggtcaatgaaaaagaaaaagaagaaatctcaaacagtacccaattccgacagccctgatcttctgacgttgcagaaatccattcattctgctagcactccaagcagcagaccaaaggagtggcgccccgagaagatctcagatctgcagacccaaagccagccattaaaatcactgcgcaagttgttacatctctcttcggcctcaaatcacccggcttcctcagatccccgcttccagcccttaacagctcaacaaaccaaaaattccttctcagaaattcggattcaccccctgagccaggcctctggcgggagcagcaacatccggcaggaacccgcaccgaagggcaggccagccctccagctgccagacggtggatgtgatggcagaagacagagacaccattctggaccccaagatagacgcttcatgttaaggacgacagaacaacaaggagaatacttctgctgtggtgacccaaagaagcctcacactccgtgcgtcccaaaccgagcccttcatcgtccaatctccagtcctgctccctatccagtactccaggtccgaggcacttccatgtgcccgacactccaggtccgaggcactgatgctttcagctgcccaacccagcaatccgggttctctttcttcgtgagacacgttatgagggaagccctgattcacagggcccaggtaaaccaagctgcgctcctgacataccatgagaatgcggcactgacgggcaagtgacttctgcaagcctgcggctggtcccaatgccctgaatcacctctctcatggaagaaccaattaacaccaatgaatcaaccattaa

SEQ ID NO: 6419 - DNA, 14572 bp, Homo sapiens
  source 1..14572: mol_type = genomic DNA
agttgtctctgccgctggggaaggtaaagcggcgacggcgtcctcaggagctgtggggtcccctgctagaagtgggggactcggcgggggagtcatttaatacttcatgattagaacaaatatgtgaaagttcccaccaaccagtgagaatttcttccttcagacggttttggatcttactgcacagctttctgagaagttcttttggtgccatgttttgtggcttgcatcaaaagaggagtttgtcttcatgaagattcctaacattggtaatgtgatgaataaatttgagatccttggggttgtaggtgaaggagcctatggagttgtacttaaatgcagacacaaggaaacacatgaaattgtggcgatcaagaaattcaaggacagtgaagaaaatgaagaagtcaaagaaacgactttacgagagcttaaaatgcttcggactctcaagcaggaaaacattgtggagttgaaggaagcatttcgtcggaggggaaagttgtacttggtgtttgagtatgttgaaaaaaatatgctcgaattgctggaagaaatgccaaatggagttccacctgagaaagtaaaaagctacatctatcagctaatcaaggctattcactggtgccataagaatgatattgtccatcgagatataaaaccagaaaatctcttaatcagccacaatgatgtcctaaaactgtgtgactttggttttgctcgtaatctgtcagaaggcaataatgctaattacacagagtacgttgccaccagatggtatcggtccccagaactcttacttggcgctccctatggaaagtccgtggacatgtggtcggtgggctgtattcttggggagcttagcgatggacagcctttatttcctggagaaagtgaaattgaccaactttttactattcagaaggtgctaggaccacttccatctgagcagatgaagcttttctacagtaatcctcgcttccatgggctccggtttccagctgttaaccatcctcagtccttggaaagaagataccttggaattttgaatagtgttctacttgacctaatgaagaatttactgaagttggacccagctgacagatacttgacagaacagtgtttgaatcaccctacatttcaaacccagagacttctggatcgttctccttcaaggtcagcaaaaagaaaaccttaccatgtggaaagcagcacattgtctaatagaaaccaagccggcaaaagtactgctttgcagtctcaccacagatctaacagcaaggacatccagaacctgagtgtaggcctgccccgggctgacgaaggtctccctgccaatgaaagcttcctaaatggaaaccttgctggagctagtcttagtccactgcacaccaaaacctaccaagcaagcagccagcctgggtctaccagcaaagatctcaccaacaacaacataccacaccttcttagcccaaaagaagccaagtcaaaaacagagtttgattttaatattgacccaaagccttcagaaggcccagggacaaagtacctcaagtcaaacagcagatctcagcagaaccgccactcattcatggaaagctctcaaagcaaagctgggacactgcagcccaatgaaaagcagagtcggcatagctatattgacacaattccccagtcctctaggagtccctcctacaggaccaaggccaaaagccatggggcactgagtgactccaagtctgtgagcaacctttctgaagccagggcccaaattgcggagcccagtaccagtaggtacttcccatctagctgcttagacttgaattctcccaccagcccaacccccaccagacacagtgacacgagaactttgctcagcccttctggaagaaataaccgaaatgagggaacgctggactcacgtcgaaccacaaccagacattctaagacgatggaggaattgaagctgccggagcacatggacagtagccattcccattcactgtctgcacctcacgaatctttttcttatggactgggctacaccagccccttttcttcccagcaacgtcctcataggcattctatgtatgtgacccgtgacaaagtgagagccaagggcttggatggaagcttgagcatagggcaagggatggcagctagagccaacagcctgcaactcttgtcaccccagcctggagaacagctccctccagagatgactgtggcaagatcttcggtcaaagagacctccagagaaggcacctcttccttccatacacgccagaagtctgagggtggagtgtatcatgacccacactctgatgatggcacagcccccaaagaaaatagacacctatacaatgatcctgtgccaaggagagttggtagcttttacagagtgccatctccacgtccagacaattctttccatgaaaataatgtgtcaactagagtttcttctctaccatcagagagcagttctggaaccaaccactcaaaaagacaaccagcattcgatccatggaaaagtcctgaaaatattagtcattcagagcaactcaaggaaaaagagaagcaaggatttttcaggtcaatgaaaaagaaaaagaagaaatctcaaacagtacccaattccgacagccctgatcttctgacgttgcagaaatccattcattctgctagcactccaagcagcagaccaaaggagtggcgccccgagaagatctcagatctgcagacccaaagccagccattaaaatcactgcgcaagttgttacatctctcttcggcctcaaatcacccggcttcctcagatccccgcttccagcccttaacagctcaacaaaccaaaaattccttctcagaaattcggattcaccccctgagccaggcctctggcgggagcagcaacatccggcaggaacccgcaccgaagggcaggccagccctccagctgccaggtcagatggatcctggttggcatgtgtcctctgtgaccaggagtgccacagagggcccttcctactctgaacagctgggtgccaaaagtgggccaaatgggcacccctataacagaacaaatcgctcacgaatgccaaatctgaatgatttaaaagagacagccttgtaatttgtgctggtaggggggaggggtggacagacaagccagtggggaggggtgggaaagggtgggctgggcttggggcatgggccgggccaagtggtgagccaatattttcagctttatgaaggtgtgtgcaatattgcatgtgttggggccgttgagctcctcgcggccacaaatgctagtcagggatcttagagccacaggagttccttagggatcgccactccccacaggtcttgtgtgagaatagatagagtgtgccattgaggaagaagaaattcttgccagtttctcccctttacattccagctttagtgcaatctctgttgaacttgggaatgccaggatgtgtcctggcactgcaagggataggaaagtcgtgttgaccgatgcccttactacatatttttttctgcctagagtaaatgtggggtttattgtaatccaagagtatccctttgaagggttagcagatgaactgtatgtcttaaattgttttctaaacttccatatttgataggatttgtaacatttatttataattaatattgtactgttaaaatcatatcttttatgttataatgtaaagttattttgagctgtttgaaacattgtgaagcagtgggacagctacagtagtttctataaaaactaaacagtaacatttatatattgcatcaggagtattttattctatatataatatatatatatggtaaatatctgttttataaatatattcatttaaagaaagtatcgttatgacactatctgccatatttttatacatttgtgatatgaagtgagtattatacttctactaaagggagttgaattgtggctacacgtgactgtaacagtatgaaccttgctcaactttgaggccccagcagtagcctctagacatgatccttggtagcagacgagatgcagcatctctttccaaacctgcaggggaagaaagtcagataggccagtgagaattccagcaggcctggtttccgtcctcacacacttggctcctgtttgtgtccagggacgttacttgcacacaggggagaatagattgaggcgttactcgtgggtctttgtagagagaatgtgctcttccacttagcattagtgtagagcgtagaccaaagatttgccagtgaacattccttgttgtgagatcataagaggtacctgtctgcagatcttgcaaaccatctctatgctcctgaatattgtccactgtcccggagactcttggctgatggggtgtgagatatatgtgtggcatttctatttctgaatgccttttttgctattgctctctccaataccatatttaaaaggctcctggagcaattccagatagataaaaaattactctatccatttttttcttcctggggctgtccacttatgacaagattttcatgcacacctgttacgcacacaacccccatcagaacaggacctatcttcccctcatctgatctctttcagctcccaagttactcccaagtatcatcaaaccctttggccatcaagtgttatcctcccatgcctctgggtcatccttgagggaagtcacctcagcaccatcatctatcagtagtagtagatttttggaattagtctctgagcaataatacttttaaaggtccctcccacccctcaaagagataacttctcagtatttattacttgtcctcaaattctgagtgtcagcccctgcatcaagtcagctatgatcaaaatgtgctgttactgttaaccctcccccgagattttgagaatcatagctctgatgattatgaagattataaagactaaggtcctagtttccctgaagcttaaattgtgcacatattgcatttttatataaatactataatgtgtattgattatatagataggtcattttaaggtgctttttatttaattttaatgagtgtaataggcactaaaatgaaactcgactgggtactattactgaaaaaatttgactcaaaccaatagttttgcatgctctttagttctttttctgtcttacttctttcaccagttcagtactgtttgggtagctctgaattctggcttttccaggcagctgcttgatgatacaaatgaggtggaccatcagcagttttgcctggacactaatgactctaaaagggtgtgtatttaactcttctttttcatactagatctctaccttgtattccccccttgcaaaccagaaactacactttttttctctggaaagacttctcactgtgctatgcgcttaggaactgcacggtcccgttgccatgctgtggcattcgaggctcgtcacctaggggctggtttcccatgttgtcatccttgctaacactgggatctcagatgtttgcagaacatttctattcatgacggttcttcaaagaagggctagaatatttgccttctacctagagcaaagtaaacctaattgttgaagagtcaatacgtactttttgtactttcccagatttgagccagaaaatacctacagatatctacaaatgttttcaaccagtgttttcgaggtagctctttaatcctcttctcagcttttgtctgttctgacttttcatccaataagctgtaagtgaactacaatctgcatttccagcatgcaattctcttcctgctcacggagggggatgcaaaagttttctctcacacctaatgggccctctcttagcttttaactgttgttttcccctgttgatgaaaaattactgacatcacaaagattgccatccatggtagaaaggacttgatttaaagtcagaaaaatttgccttttctttaggaaggggaattcatgacatccatgtcctattatcggccgtaacttcctaaagaagaaaaagggtgaatgaaagcttatgttacttttatgaaagtatcactgatctcctttggaaaagaaactctgcttcactgtttttctacctttatttctctgccatcctcgtttttcctctctgaagttctaaataccctttaactgaaccttgttggtcttgctctaaaatttagcctctttctagagcccaagaccaaaagggagtgcttcatgctgaggggctcaagtgagctgactctacaactgtggttctcaactaggggcagatttacccccaagggtacatttggcaatgtctggggacatttggttgtcatagctgggggggaggtgatggtatgctactggcatcaagtggttagaggccacagatgctactaaacaccctgccatgcacaggacagccccccaaacaaacagtggtccagccccaagcactactagtgctgaggttgagaaaccctgccctacaccatcccaagcccaccagtctgcagagcttggctctggccttgttctgtccaggctacagtactgcaggtgtgatttcttcaacatcacattctcttaagagtcttcaaccactatgcctgaatccttggaatcctattgttcgtttccattgtcttgggcctgctaaaaggtgcatactttggaaggagaccagagttactttataggtgttggagaacttaaattctaggttagcatccttagaaaatctttcatagagccatgaggcttatatttagaagcaagcaacagcctggcagattggcatgatttttaccaactgctcaaaggcatccgtggctttcagctgtgtctcccgaaagaaaatgtctttgttttttattcaagtcatttaatagctctttacaaatattagcatatggcagaccaattagaagcaaaaaagtccgtattggtggttgtgatgtggctgttatagaagtatttgtgctgtatgctttggttaaatctgttttaaaacatgctttaagattcaccttacgcagttgtactttaattctaagctcagagctatgctgtcagtctctagtcacgccatgtattataaagtatgttgtggttgtagagttagccagtttagcatgttcctaatctgagaattagtggactatactaggaaatgctatcccattttccctttccagcccctcttagttaagatcatagtatcctcacttcttaaactagtctttagagtaaataaggaaaaaagccatttattttcttctagccatgtattattgagaatgactcatagtacaactttttttcaaaggccagaggattactttgcaagtgtgtagaaagatctgtctatttctgttcacctgggacctggtggtgactgaactctttcagcaagggcaatggctcaatgtgattcggtgctggagctcagctgggactcagtaaatctgcacgttctctgctggtcagaacatgtttcctggagagcattgcttttctatctagaagttcgttacctcctgcatgatagtgggatattgagatgtgggttctaagatccacagactcatacttttgtgaactttggaatgtggtagggtacactgaaccaagtcagaaaatagtgaaatatttccttgcctccttcagttcatcactaagaaagtgtgtaggcagagaaaacttacttatggtttgaagaaccacaattgtttttgaaaggggacatagaaaagacagtacaaaggttgtaagtgtcctgtcgctaattcccagggccagaatctcacaagaagatcctctcaaagacttaaaagcctggcttacaaaaataaccagaaaccaaacttgtaagcagttacaatttcttccttttgcttcttgaccagctgagatacagaatatcttgaggtctggttcagctgatgaaaaattctgtctcagaaacgatgagtaagaaaccatacaagaaaaagaagtccctcatctatctgcatacacgcaatgtgggagaagtggggtggctaggaaactctgggcctgctgcccccttcgattctttttttttttctttgtgaattgaatgtacgatacaaatggtaggccttcatgtgagccagttactacatgaatcttcatttcccacagtggtttgttcattcatcagcgttaggcttggtcctggctccacctttctcctctccgggcactgaccccacctttccgtgtatttactgtaggctattaaatatgatcatgacccgccttgcattttcattcatcacctgtttatgcccaaatttaaaggaagtttgtctcattttgccagaaaaaaattgtaatagtcggcacgctggatttgtagggccagcaaaattgcggcagtgaaactagtttcacttctaaagcccttcatttcccacaaggttaagctctcgaaaccccatttgatccttggttcctatttcgatcctcctttggaatctgaaaatcggtctccatgttgtatgcagattagaagttgccttgtttgttactcttccaacacagggtatcagggagaaagaggccttatctgttcctccatcccccctgttttgacagactgctaagaattcctcaggacttcctttggttggggattttactttcccaaaagtctgatctgatttctttcaggggtagacaagcttgtcctagtgctctgcttcaggtcttatcagaagaaacccaggaatagaaaaggtagatgccttgacttttgtccctgttgtggggactaaagtgttttttgccagaattgtcaaaagctccggttcaaactctgtagagtttcatggaaaaacaaaacaaaacaaaaaagatgcttatcgtcccggagaatgtgtaagtaagttctccagcacggcttaggttttccaaaatggaaagcaaagcttgcagacaacctgttttctctagagacacacaatgattctggccctcagtctgtttccctccccttgtttactctttggtcaccgatcgagtcaggctagaggggtaatacggtgattaaaagaagtaaattctcactgtaaacttggattgattaacagaaacaattaaaccaaacaaaatcattgccccaaatttctatctccaagaattgctttgtgccattttgaattcaggtagttattctgtatatacttagctaactattcagagcttcttcaatctctagtaagcttgaaggtggtgtctgggaagacacagggcagggtgacatttagactctgttcattcttaaaaatagggataagccagaatgatgtgacatctagtatgtggtagatgaagaatcagtggaaattcttaattgcacagactttataatccattatataaagtgtaattccatactttttactgtggcaagggtgtgatgtgattgttaatctttttaatttttgaatccaaactgaatttaaagtgttgaatacttaaatcctcacaagtgaattatgaaccatttgtaaagtgtttctataactctttgtatcatgtgttggtacatcttatcaagttttttctggcatgtaattccattctaaacttatgtaaaatttctattgttgctgtaaatattacacaaatatctattccgtgataaccttcattatcagcatgaaatggttaatttttactgagcacaatgtatttttgaatggatcttcccaaatgtctttaataaaatgcagattttgcactgactgatgtgactgccaggccgtcccaatcttgagcactgtggtccttcgtgtttgaactgcgaacagctccattttagttccttcttgggaagaaagaatgcattcgaattcaaatgagggatgatgggcctttgaggttgtaatcagtttgagacagaaattaatgtaaaactaggcaaatcctgtaacttaatgatgttgatctttgttttcctatttataaagcttttttccccttacggcattttgaaaactttggtttgttttatacttgagtgttgtcacctttgcacgtcgctagacactcacgtggtagtttgaggaggatgggaagagaggccaatcttgtgctaagtgctatggagaaagcaaagatgcacagcttaataagggttttttgattctagaggagaggtgggcaagcttttcctgtaaagggccagatggtaaatattgggggctctgtggcccatcagttccctgtcaacattactcagctctgcctttgtattgcagaggctgcatggataatatgtaaatcagtaagtgtggctgtggtcccgtaaaactttacttatagaaacaggccatagtttactaacccgttttaggccctcagtttcatcatttagggtaacaccaaccgagtacatgttcaatcaggagggaaagaacttagcttttgtgataacttatagatgaaatattccccagttttctttctctttctaaacaaagggtaggagctgaaagtcagtgctctccattcttaaaagtcctctgtcaaccacctcttcactctatctccttaagtgacatggaaacttgtggcctgtgctttcaactataatcttaccaagactgaatgaaagtatttggtgcttatactttttaatgttcatagcacttactatggccaggcacaatgcccaagtgttttgctttattattattattattattattattattattattattattattattttcacaacaacccagcgaaacaggtactattattatcccctttttgtaaatgaggaaacagatttccatacttgacattaacctgcccaaggtcacccagtttggaagtggcagggccaggatttgaagccgaatatgttcattgtaaagcccatatacccttaaaagtcactgcacgtccacgtatggtaatgtggtcacaatcagtattgtttctctttagtaattcagatttattcaagtaactccaaggttcaaattttcaaaaacagtttccaacacaggttatattaaaaactttgcctgaagtttactctaggtgcagaaataaagacaacttagtcaagtgaaggaaagggtaacagacttagaaatggctatctacactgatggaataagtatactaattagagcaggtaacaagtccccacgatgtataacatattcttctctaaaagctcacaacaatttatgtgccaccttccatcccctttcccagcagatggtaattgatgcaatttgagaatagaacacttcattgaaacaagtcactggaggtcctctggggatgcagcttaaaagcccaggatcaggccaggtgtggtggctcacgcctgtaatcccagcactgtgggagactgagacgggcagatcacctgaagtcaggagttcgagaccagcctggccaatatagagaaaccccgtctgtactaaaaatacaaaaattaggtctgggcggtggctcacgcccgtaatcctagcactttgggaggccaaggtgggtggatcacgaggtcaggagttcgagaccagcctggccaacatggtgaaaccccgtctctactaaaaatacaaaaattgggtgtggtggtacatgcctgtaatcccagctgcttaggaggctgaggcaggagaatcacttgaacccaaaaggcagaggttgcagtgagccgagatcacgccactgcactccagcctggcaacagagcgagactctgtctcaaaaaaaaaaaaaaaaaaatacaaaaattagccgggaatggtggtgaatgtctataatcccagccactcgggaggctgaggcaggagaatcacttgaacccaaaaggcagaggttgcagtgagccaagatcgcaccactgcactcccacctggacgacagagcgagacgccatctcaaaaataaataaataaataaatccctaggatatagagtccgcttgcctgggtggagtcttggctccatctcctacatctcatgtgacttgaagcaaggcacttcactatgcctcagtttccttatctttaaatggaggtaatcacagtacctacctcagtgttgttgtgaagatttaatgagataataacctgcagagcacttgagagtctcaagaaatatgagctcttataacattattgctattgtaaaacattgctattacttctgtcccaatttggcagtttcaggaaattgagaaggaatgtcactgaatctttaatgccagttacacagagctcagtaggtgtccgcacagccctttagatgcacgtagcctatttgatcttcgtatcagccctgtaaggttgggcttaagaatgacccagcatggaagtactcttgggaccacaggggaagcaacagtccttgtaagctgtttgtcagtgggccttagcaaccaagccccaagtggacagaaagatggggttctgtgagcatccattccaagggtcactttaggggtgcaatcttctgggctctgagaatggattcacagcagcatctctatctggaaatacctttgctttgtccaagtaacctcctcccacacagagtacccgaatcagctcagattttttttccttaatattggcaacacttaatgctacttctttgttcgtaacatttcatttaattatttaaaaatctgcaaatgttgtgtatattttaccgcaatttttaaacaaactccagtgtagaccgtgctctagcatttctaaaaataaaagtaaatatgttaaaataaggtaagagtgagtttttcctacactatgtataatttttaattgaaagtttcccccacaaaagaaatgatacttggaagcatagtttgtgtgtttgacagcaagattctattaggcttcagatttccctcaataaaagttttagtttttatacattctgtcatgaattgaatgaagtaaataatatgctgttgtaagcaaattatctgcagataaatgtcttatgaatcgtatatcttactgtttattaaattctgaagtattgagcagtttccaatgtgaaatcccagctggcttctttgcaatgatggacaagttagttataattcatatggaaattcaaggaacccagaatagccaaaacaatcccgaagagcaaagttggaggactcacatgccccaatttcaaaacttactacaaagctacaataatgaagaaagtgaggtaatagaatttggagtccagaaataaaccctctcacatttatggtcaattgttttttgacaagggtgccaagatcattcaatgggggaaagaatagtcttttcagcaaatagtggtgggacaactggatatccacatgcaaaagaatgacgttggactcctatttcacaccatatacaaaaattaactcaaaatggaacaaagatctaactgtaagaggtagaactataaaactcatagaagaaaacataggggtaaatcttcatgaccttggatttggcagtggtttctcagatatgacaccaaaggcacaagcaaagagaaaaataaattggacttcatcaaatatttaaaattttgtgcttaagaggactctatcgagagggttaaaaagatccacagaatgggagaaaatatttgcaaatcatatccaataagggaattagaatatacaaagaattcttaaactcagtaagttgtaagccgatttaaaatgggcagaggatctgaaaaacctttatccaaagatgtacaaatggccagtaaacacatgaaaagatgctcaacatcattagtcactagggaaatgcaaatcaaaaccacagttgagatgcaacttcacacattatgggtatagtcaaagatggacagtaacaagtgttgctgaggatgtggagaaagtggaagcctcctacattgctggtggaaatgtaaaatgatgcagccacttgggataatagttcctccaaagattaaacaagagtgactgtgtgtcccagcagttttactcctaagtatatacccaagataaatgaaaacacacatccgcacaaaaacttatacacaaatgttcatagcagcattattcataatagctaaagagtggaaacccaaatatccatcaatggatgaatggataaataacaatgtgctcttgacatgatactgaacaatgatgttcagcaataaaaaggagtgacaagtgacatagtgatacacatgttataacgtggatgaactttaaaacactatgctaagtgaaagaagccagtcacgaaataccacatactatatgatttcatttatgtagaacgtccagaaggccaatctacagagacagtcgattcgtggttgcagagggcttggggtggccgatgggttggggagtgttggctgatgggtgcaggatttctctttggggtgataaactttctaaaattgatctagtgataatggttgcacaactctgaatataccaaaagtcatcaaattgtacactttaaatggatacaaattgtatgtgaacttaatctcaataaagccgtgacaaaagtttccaacatgaa